(19) United States
(12) Patent Application Publication
(10) Pub. No.: US 2016/0202242 A1
(43) Pub. Date: Jul. 14, 2016

(54) CELL DEATH-INDUCING AGENT, CELL GROWTH-INHIBITING AGENT, AND PHARMACEUTICAL COMPOSITION FOR TREATMENT OF DISEASE CAUSED BY ABNORMAL CELL GROWTH

(71) Applicant: Nitto Denko Corporation, Osaka (JP)

(72) Inventors: Hiroyuki TANAKA, Osaka (JP); Kenjirou MINOMI, Osaka (JP); Yoshiro NIITSU, Hokkaido (JP)

(21) Appl. No.: 14/980,055

(22) Filed: Dec. 28, 2015

Related U.S. Application Data
(63) Continuation-in-part of application No. 14/793,212, filed on Jul. 7, 2015.

(30) Foreign Application Priority Data
Dec. 26, 2014 (JP) 2014-266198
Jul. 6, 2015 (JP) 2015-135494
Dec. 18, 2015 (JP) 2015-247725

(51) Int. Cl. G01N 33/50; A61K 31/713

(52) U.S. Cl. CPC G01N 33/5011; A61K 31/713

(57) ABSTRACT

It is intended to induce cell death and inhibit cell growth for cancer cells.

The agents of the present invention comprise, as active ingredients, a drug inhibiting GST-π and a drug inhibiting a homeostasis-related protein that exhibits synthetic lethality when inhibited together with GST-π.

### TECHNICAL FIELD

[0001] The present invention relates to a cell death-inducing agent and a cell growth-inhibiting agent for a cancer cell, and a pharmaceutical composition for the treatment of a disease caused by abnormal cell growth and further relates to a method for screening for a cell death-inducing agent and/or a cell growth-inhibiting agent.

### BACKGROUND ART

[0002] Typical examples of diseases caused by abnormal cell growth can include cancers. Cancers are diseases in which cells grow in an uncontrolled manner due to mutations, epigenetic abnormalities, etc., in genes. A large number of gene abnormalities in cancers have already been reported (e.g., Futreal et al., Nat Rev Cancer. 2004; 4 (3): 177-83), most of which are considered to have some relation to signal transduction involved in cell growth, differentiation, or survival. Moreover, such gene abnormalities cause abnormal signal transduction in cells constituted by normal molecules. This may bring about the activation or deactivation of a particular signal cascade and eventually become partly responsible for the abnormal growth of the cells.

[0003] Although a principal objective of cancer treatment in early times was to inhibit cell growth itself, such treatment physiologically inhibited even the growth of normal cells and therefore involved adverse reactions such as alopecia, gastrointestinal disturbances, and myelosuppression. Accordingly, therapeutic drugs for cancers based on novel ideas such as molecular target drugs, which target cancer-specific gene abnormalities or abnormal signal transduction, are under development in order to prevent such adverse reactions.

[0004] A cancer is thought to occur by the accumulation of abnormalities in various cancer genes, tumor suppressor genes, DNA repair enzyme genes, and the like in the same cell. RAS gene, FOS gene, MYC gene, and BCL-2 gene, etc., are known as the cancer genes. Among cancer-specific gene abnormalities, a mutation is found in KRAS gene in approximately 95% pancreatic cancer, approximately 45% colorectal cancer, and many other cancers with high frequency. The KRAS protein is a G protein that is localized to the inner side of a cell membrane. RAS including KRAS forms a cascade where RAS activates RAF such as C-RAF or B-RAF, and subsequently, this RAF activates MEK, which then activates MAPK. When a point mutation takes place in KRAS, GTPase activity is reduced so that GTP-bound active forms are maintained to thereby constitutively sustain signals to downstream pathway, resulting in abnormal cell growth. As typified by the KRAS gene, the cancer genes cause abnormal cell growth which in turn progresses to the malignant transformation of the cell and eventually a cancer as a disease.

[0005] Incidentally, glutathione-S-transferase (GST), an enzyme catalyzing glutathione conjugation, is known as an enzyme that converts a substance such as a drug to a water-soluble substance through coupling with glutathione (GSH). GST is typically classified, on the basis of amino acid sequences, into 6 types of isozymes: α, μ, ω, π, θ, and ζ. Among them, particularly, the expression of GST-π (glutathione S-transferase pi, also called GSTP1) is increased in various cancer cells. The possibility has been pointed out that this is partly responsible for resistance to some anticancer agents. In fact, it is known that when an antisense DNA against GST-π or a GST-π inhibitor is allowed to act on a GST-π-overexpressing cancer cell line that exhibits drug resistance, the drug resistance is inhibited (Takahashi and Niitsu, Gan To Kagaku Ryoho. 1994; 21 (7): 945-51; Ban et al., Cancer Res. 1996; 56 (15): 3577-82; and Nakajima et al., J Pharmacol Exp Ther. 2003; 306 (3): 861-9). In addition, a recent report has showed that when an siRNA against GST-π is allowed to act on a GST-π-overexpressing androgen-independent prostate cancer cell line, its growth is inhibited so that apoptosis is increased (Hokaiwado et al., Carcinogenesis. 2008; 29 (6): 1134-8).

[0006] It is also known that GST-π forms a complex with c-Jun N-terminal kinase (JNK) to inhibit JNK activity (Adler et.al, EMBO J. 1999, 18, 1321-1334). It is further known that GST-π participates in the S-glutathionylation of proteins associated with the stress response of cells (Townsend, et.al, J. Biol. Chem. 2009, 284, 436-445). In addition, it is known that GST-π contributes to a protective effect against cell death induced by reactive oxygen species (ROS) (Yin et.al, Cancer Res. 2000 60, 4053-4057). Thus, it can be understood that among the GST isozymes, GST-π has various features and functions.

[0007] It has been reported that when an siRNA against GST-π is allowed to act on a cancer cell line having a mutation in KRAS, the activation of Akt is inhibited so that autophagy is enhanced whereas apoptosis is moderately induced (Nishita et al., AACR 102nd Annual Meeting, Abstract No. 1065). WO2012/176282 discloses that use of a drug inhibiting GST-π and an autophagy inhibitor such as 3-methyladenine as active ingredients can induce the apoptosis of cancer cells. Furthermore, WO2014/098210 discloses that: when the expression of GST-π and the expression of Akt or the like are inhibited at the same time, cell growth is inhibited to induce cell death; and autophagy induced by the inhibition of GST-π expression is significantly inhibited by inhibiting the expression of GST-π and the expression Akt or the like at the same time.

[0008] However, much still remains unknown about the relation of the expression of GST-π in cancer cells to cell growth or cell death, the role of GST-π in signal transduction, etc.

### SUMMARY OF INVENTION

### Object to be Attained by the Invention

[0009] Thus, an object of the present invention is to provide an agent having a cell death-inducing effect and/or a cell growth-inhibiting effect on a cancer cell, to provide a pharmaceutical composition for the treatment of a disease caused by abnormal cell growth, and to provide a method for screening for a cell death-inducing agent and/or a cell growth-inhibiting agent.

### Means for Attaining the Object

[0010] The present inventors have conducted diligent studies in light of the object mentioned above and consequently completed the present invention by finding that a homeostasis-related protein that exhibits synthetic lethality when inhibited together with GST-π is inhibited along with the inhibition of GST-π in a cancer cell, whereby cell death is more strongly induced and cell growth is more strongly inhibited as compared with the case where either of them is inhibited. The present invention encompasses the following:

[0011] (1) A cell death-inducing agent for a cancer cell comprising, as active ingredients, a drug inhibiting GST-π and a drug inhibiting a homeostasis-related protein that exhibits synthetic lethality when inhibited together with GST-π.

[0012] (2) A cell growth-inhibiting agent for a cancer cell comprising, as active ingredients, a drug inhibiting GST-π and a drug inhibiting a homeostasis-related protein that exhibits synthetic lethality when inhibited together with GST-π.

[0013] (3) The agent according to (1) or (2), wherein the homeostasis-related protein that exhibits synthetic lethality along with the inhibition of GST-π is a protein selected from the group consisting of a cell cycle-regulating protein, an anti-apoptosis-related protein, and a PI3K signaling pathway-related protein.

[0014] (4) The agent according to (3), wherein the cell cycle-regulating protein that exhibits synthetic lethality along with the inhibition of GST-π is at least one cell cycle-regulating protein selected from the group consisting of ATM, CDC25A, p21, PRKDC, RBBP8, SKP2, MCM10, RNPC1, CCNL1, CENPH, BRSK1, MCM8, CCNB3, MCMDC1 and MYLK.

[0015] (5) The agent according to (3), wherein the cell cycle-regulating protein that exhibits synthetic lethality along with the inhibition of GST-π is at least one protein selected from the group consisting of p21, RNPC1, CCNL1, MCM8, CCNB3, and MCMDC1.

[0016] (6) The agent according to (3), wherein the anti-apoptosis-related protein that exhibits synthetic lethality along with the inhibition of GST-π is at least one anti-apoptosis-related protein selected from the group consisting of AATF, ALOX12, ANXA1, ANXA4, API5, ATF5, AVEN, AZU1, BAG1, BCL2L1, BFAR, CFLAR, IL2, MALT1, MCL1, MKL1, MPO, MTL5, MYBL2, and MYO18A.

[0017] (7) The agent according to (3), wherein the PI3K signaling pathway-related protein that exhibits synthetic lethality along with the inhibition of GST-π is at least one PI3K signaling pathway-related protein selected from the group consisting of MTOR, IRAK1, IRS1, MYD88, NFKB1, PIK3CG, RAC1, AKT3, EIF4B, EIF4E, ILK, MTCP1, PIK3CA, and SRF.

[0018] (8) The agent according to (1) or (2), wherein the drug is a substance selected from the group consisting of an RNAi molecule, a ribozyme, an antisense nucleic acid, a DNA/RNA chimeric polynucleotide, and a vector for expressing at least one of them.

[0019] (9) The agent according to (1) or (2), wherein the drug inhibiting a homeostasis-related protein is a compound that acts on the homeostasis-related protein.

[0020] (10) The agent according to (1), wherein the agent induces apoptosis.

[0021] (11) The agent according to (1) or (2), wherein the cancer cell is a cancer cell highly expressing GST-π.

[0022] (12) A pharmaceutical composition for the treatment of a disease caused by abnormal cell growth, comprising an agent according to any of (1) to (11).

[0023] (13) The pharmaceutical composition according to (12), wherein the disease is a cancer.

[0024] (14) The pharmaceutical composition according to (13), wherein the cancer is a cancer highly expressing GST-π.

[0025] (15) A method for screening for a cell death-inducing agent and/or a cell growth-inhibiting agent for a cancer cell that is used together with a drug inhibiting GST-π, comprising a step of selecting a drug inhibiting a homeostasis-related protein that exhibits synthetic lethality when inhibited together with GST-π.

[0026] (16) The screening method according to (14), wherein the homeostasis-related protein that exhibits synthetic lethality along with the inhibition of GST-π is a protein selected from the group consisting of a cell cycle-regulating protein, an anti-apoptosis-related protein, and a PI3K signaling pathway-related protein.

[0027] (17) The screening method according to (16), wherein the cell cycle-regulating protein that exhibits synthetic lethality along with the inhibition of GST-π is at least one protein selected from the group consisting of ATM, CDC25A, p21, PRKDC, RBBP8, SKP2, MCM10, RNPC1, CCNL1, CENPH, BRSK1, MCM8, CCNB3, MCMDC1 and MYLK.

[0028] (18) The screening method according to (16), wherein the cell cycle-regulating protein that exhibits synthetic lethality along with the inhibition of GST-π is at least one protein selected from the group consisting of p21, RNPC1, CCNL1, MCM8, CCNB3, and MCMDC1.

[0029] (19) The screening method according to (16), wherein the anti-apoptosis-related protein that exhibits synthetic lethality along with the inhibition of GST-π is at least one anti-apoptosis-related protein selected from the group consisting of AATF, ALOX12, ANXA1, ANXA4, API5, ATF5, AVEN, AZU1, BAG1, BCL2L1, BFAR, CFLAR, IL2, MALT1, MCL1, MKL1, MPO, MTL5, MYBL2, and MYO18A.

[0030] (20) The screening method according to (16), wherein the PI3K signaling pathway-related protein that exhibits synthetic lethality along with the inhibition of GST-π is at least one PI3K signaling pathway-related protein selected from the group consisting of MTOR, IRAK1, IRS1, MYD88, NFKB1, PIK3CG, RAC1, AKT3, EIF4B, EIF4E, ILK, MTCP1, PIK3CA, and SRF.

[0031] (21) The screening method according to any of (15) to (20), comprising the steps of: contacting a test substance with a cancer cell; measuring the expression level of the homeostasis-related protein in the cell; and selecting the test substance as a drug inhibiting the homeostasis-related protein when the expression level is decreased compared with that measured in the absence of the test substance.

[0032] (22) A method for screening for a cell death-inducing agent and/or cell growth-inhibiting agent for a cancer cell that is used together with a drug inhibiting a homeostasis-related protein that exhibits synthetic lethality when inhibited together with GST-π, comprising a step of selecting a drug inhibiting GST-π.

[0033] (23) The screening method according to (22), wherein the homeostasis-related protein that exhibits synthetic lethality along with the inhibition of GST-π is a protein selected from the group consisting of a cell cycle-regulating protein, an anti-apoptosis-related protein, and a PI3K signaling pathway-related protein.

[0034] (24) The screening method according to (22), wherein the cell cycle-regulating protein that exhibits synthetic lethality along with the inhibition of GST-π is at least one protein selected from the group consisting of ATM, CDC25A, p21, PRKDC, RBBP8, SKP2, MCM10, RNPC1, CCNL1, CENPH, BRSK1, MCM8, CCNB3, MCMDC1 and MYLK.

[0035] (25) The screening method according to (23), wherein the cell cycle-regulating protein that exhibits synthetic lethality along with the inhibition of GST-π is at least one protein selected from the group consisting of p21, RNPC1, CCNL1, MCM8, CCNB3, and MCMDC1.

[0036] (26) The screening method according to (23), wherein the anti-apoptosis-related protein that exhibits synthetic lethality along with the inhibition of GST-π is at least one anti-apoptosis-related protein selected from the group consisting of AATF, ALOX12, ANXA1, ANXA4, API5, ATF5, AVEN, AZU1, BAG1, BCL2L1, BFAR, CFLAR, IL2, MALT1, MCL1, MKL1, MPO, MTL5, MYBL2, and MYO18A.

[0037] (27) The screening method according to (23), wherein the PI3K signaling pathway-related protein that exhibits synthetic lethality along with the inhibition of GST-π is at least one PI3K signaling pathway-related protein selected from the group consisting of MTOR, IRAK1, IRS1, MYD88, NFKB1, PIK3CG, RAC1, AKT3, EIF4B, EIF4E, ILK, MTCP1, PIK3CA, and SRF.

[0038] (28) The screening method according to any of (22) to (27), comprising the steps of: contacting a test substance with a cancer cell; measuring the expression level of GST-π in the cell; and selecting the test substance as a drug inhibiting GST-π when the expression level is decreased compared with that measured in the absence of the test substance.

[0039] (29) A method for screening for a cell death-inducing agent and/or a cell growth-inhibiting agent, comprising a step of selecting a drug inhibiting GST-π and homeostasis-related protein that exhibits synthetic lethality when inhibited together with GST-π.

[0040] (30) The screening method according to (29), wherein the homeostasis-related protein that exhibits synthetic lethality along with the inhibition of GST-π is a protein selected from the group consisting of a cell cycle-regulating protein, an anti-apoptosis-related protein, and a PI3K signaling pathway-related protein.

[0041] (31) The screening method according to (30), wherein the cell cycle-regulating protein that exhibits synthetic lethality along with the inhibition of GST-π is at least one cell cycle-regulating protein selected from the group consisting of ATM, CDC25A, p21, PRKDC, RBBP8, SKP2, MCM10, RNPC1, CCNL1, CENPH, BRSK1, MCM8, CCNB3, MCMDC1 and MYLK.

[0042] (32) The screening method according to (30), wherein the cell cycle-regulating protein that exhibits synthetic lethality along with the inhibition of GST-π is at least one protein selected from the group consisting of p21, RNPC1, CCNL1, MCM8, CCNB3, and MCMDC1.

[0043] (33) The screening method according to (30), wherein the anti-apoptosis-related protein that exhibits synthetic lethality along with the inhibition of GST-π is at least one anti-apoptosis-related protein selected from the group consisting of AATF, ALOX12, ANXA1, ANXA4, API5, ATF5, AVEN, AZU1, BAG1, BCL2L1, BFAR, CFLAR, IL2, MALT1, MCL1, MKL1, MPO, MTL5, MYBL2, and MYO18A.

[0044] (34) The screening method according to (30), wherein the PI3K signaling pathway-related protein that exhibits synthetic lethality along with the inhibition of GST-π is at least one PI3K signaling pathway-related protein selected from the group consisting of MTOR, IRAK1, IRS1, MYD88, NFKB1, PIK3CG, RAC1, AKT3, EIF4B, EIF4E, ILK, MTCP1, PIK3CA, and SRF.

[0045] (35) The screening method according to any of (29) to (34), comprising the steps of: contacting a test substance with a cancer cell; measuring the expression level of GST-π and the expression level of the homeostasis-related protein that exhibits synthetic lethality when inhibited together with GST-π, in the cell; and selecting the test substance as a drug inhibiting GST-π and the homeostasis-related protein that exhibits synthetic lethality when inhibited together with GST-π when the expression level of GST-π and the expression level of the homeostasis-related protein that exhibits synthetic lethality when inhibited together with GST-π are both decreased compared with those measured in the absence of the test substance.

[0046] This description includes part or all of the contents as disclosed in the description and/or drawings of Japanese Patent Application No. 2014-266198, Japanese Patent Application No. 2015-135494 and Japanese Patent Application No. 2015-247725, which are priority documents of the present application.

### Effects of the Invention

[0047] The cell death-inducing agent according to the present invention can very strongly induce cell death for a cancer cell. Accordingly, the cell death-inducing agent according to the present invention can exert very high efficacy as a pharmaceutical composition for the treatment of a disease caused by the abnormal growth of the cancer cell.

[0048] Moreover, the cell growth-inhibiting agent according to the present invention can very strongly inhibit cell growth for a cancer cell. Accordingly, the cell growth-inhibiting agent according to the present invention can exert very high efficacy as a pharmaceutical composition for the treatment of a disease caused by the abnormal growth of the cancer cell.

[0049] Furthermore, the screening method according to the present invention can select a drug that very strongly induces cell death and/or inhibits cell growth for a cancer cell.

### BRIEF DESCRIPTION OF THE DRAWINGS

[0050] FIG. 1 is a characteristic diagram showing results of assaying GST-π mRNA and p21 mRNA in cells expressing mutated KRAS when an siRNA inhibiting the expression of GST-π and/or an siRNA inhibiting the expression of p21 was allowed to act thereon.

[0051] FIG. 2 is a characteristic diagram showing results of quantifying over time p21 mRNA when GST-π and p21 were both knocked down.

[0052] FIG. 3 is a characteristic diagram showing results of measuring the number of cells when GST-π and p21 were both knocked down.

[0053] FIG. 4 is a characteristic diagram showing results of measuring the number of cells when GST-π and p21 were both knocked down three times.

[0054] FIG. 5 is a characteristic diagram showing results of measuring the number of cells when GST-π and p21 were both knocked down three times.

[0055] FIG. 6 is a photograph taken for the phase difference image of A549 cells when GST-π and p21 were both knocked down three times.

[0056] FIG. 7 is a photograph taken for the phase difference image of MIA PaCa-2 cells when GST-π and p21 were both knocked down three times.

[0057] FIG. 8 is a photograph taken for the phase difference image of PANC-1 cells when GST-π and p21 were both knocked down three times.

[0058] FIG. 9 is a photograph taken for the phase difference image of HCT116 cells when GST-π and p21 were both knocked down three times.

[0059] FIG. 10 is a photograph taken for the phase difference image of M7609 cells when GST-π was knocked down three times and (3-galactosidase staining was carried out.

[0060] FIG. 11 is a characteristic diagram showing results of quantifying the expression of PUMA gene when GST-π and p21 were both knocked down.

[0061] FIG. 12 is a characteristic diagram showing results of comparing relative survival rates when GST-π and a candidate protein (cell cycle-regulating protein) exhibiting synthetic lethality were knocked down each alone and when GST-π and the candidate protein were both knocked down.

[0062] FIG. 13 is a characteristic diagram showing results of comparing relative survival rates when GST-π and a candidate protein (anti-apoptosis-related protein) exhibiting synthetic lethality were knocked down each alone and when GST-π and the candidate protein were both knocked down.

[0063] FIG. 14 is a characteristic diagram showing results of comparing relative survival rates when GST-π and a candidate protein (PI3K signaling pathway-related protein) exhibiting synthetic lethality were knocked down each alone and when GST-π and the candidate protein were both knocked down.

[0064] FIG. 15 is a characteristic diagram showing results of comparing relative survival rates when GST-π and MYLK were knocked down each alone and when GST-π and MYLK were both knocked down.

### DESCRIPTION OF THE PREFERRED EMBODIMENTS

[0065] The cell death-inducing agent and the cell growth-inhibiting agent according to the present invention comprise, as active ingredients, a drug inhibiting GST-π and a drug inhibiting a homeostasis-related protein that exhibits synthetic lethality when inhibited together with GST-π. The cell death-inducing agent and the cell growth-inhibiting agent according to the present invention exhibit a cell death-inducing effect and a cell growth-inhibiting effect on a cancer cell. In this context, the cancer cell is a cell that exhibits abnormal growth attributed to genes (cancer-related genes).

[0066] Of the cancer-related genes, examples of cancer genes can include KRAS gene, FOS gene, MYC gene, BCL-2 gene, and SIS gene. Also, of the cancer-related genes, examples of tumor suppressor genes can include RB gene, p53 gene, BRCA1 gene, NF1 gene, and p73 gene. However, the cancer cell is not limited to cancer cells in which these specific cancer-related genes are involved, and the agents of the present invention can be applied to a wide range of cells that exhibit abnormal cell growth.

[0067] Particularly, it is preferable that the cell death-inducing agent and the cell growth-inhibiting agent according to the present invention should be applied to a cancer cell highly expressing GST-π, among the cancer cells. In this context, the cancer cell highly expressing GST-π means a cell having a significantly higher expression level of GST-π than that of a normal cell, among the cells that exhibit abnormal cell growth (so-called cancer cells). The expression level of GST-π can be measured according to a standard method such as RT-PCR or microarrays.

[0068] In many cases, one example of the cancer cell highly expressing GST-π can include a cancer cell expressing mutated KRAS. Specifically, it is preferable that the cell death-inducing agent and the cell growth-inhibiting agent according to the present invention should be applied to the cancer cell expressing mutated KRAS.

[0069] The mutated KRAS means a protein having an amino acid sequence in which mutation(s) such as deletion, substitution, addition, and/or insertion is introduced in the amino acid sequence of wild-type KRAS. In this context, the mutation in the mutated KRAS is a so-called gain of function mutation. Specifically, in the cell expressing mutated KRAS, for example, GTPase activity is reduced due to the mutation so that GTP-bound active forms are maintained to thereby constitutively sustain signals to downstream pathway, resulting in abnormal cell growth as compared with the cell expressing wild-type KRAS. Examples of a gene encoding the mutated KRAS include a gene having a mutation at at least one of codon 12, codon 13, and codon 61 in the wild-type KRAS gene. Particularly, mutations at codons 12 and 13 are preferable for the mutated KRAS. Specific examples thereof include mutations by which glycine encoded by codon 12 of the KRAS gene is replaced with serine, aspartic acid, valine, cysteine, alanine, or arginine, and mutations by which glycine encoded by codon 13 of the KRAS gene is changed to aspartic acid.

[0070] As used herein, GST-π refers to an enzyme that is encoded by GSTP1 gene and catalyzes glutathione conjugation. GST-π is present in various animals including humans, and its sequence information is also publicly known (e.g., human: NM 000852 (NP 000843), rat: NM 012577 (NP 036709), mouse: NM 013541 (NP 038569), etc.; the numbers represent accession numbers of the NCBI database, and the nucleotide sequence and the amino acid sequence are indicated outside and inside the parentheses, respectively). As one example, the nucleotide sequence of the coding region of the human GST-π gene registered in the database is shown in SEQ ID NO: 1, and the amino acid sequence of the human GST-π protein encoded by this human GST-π gene is shown in SEQ ID NO: 2.

[0071] As used herein, the homeostasis-related protein that exhibits synthetic lethality when inhibited together with GST-π is a protein that results in a significantly high death rate of a cancer cell when inhibited together with GST-π as compared with the death rate of the cancer cell brought about by the inhibition of GST-π alone. This protein has the function of participating in cell homeostasis. In this context, the synthetic lethality means a phenomenon in which lethality is exerted or significantly enhanced for a cell or an individual by a combination of defects of a plurality of genes, though only one of the gene defects leads to no or low lethality. Particularly, in the present specification, the synthetic lethality means lethality for a cancer cell.

[0072] In the present specification, examples of the homeostasis-related protein that exhibits synthetic lethality when inhibited together with GST-π can include a cell cycle-regulating protein, an anti-apoptosis-related protein, and a PI3K signaling pathway-related protein. The cell cycle-regulating protein is a protein having the function of regulating cell cycle. The anti-apoptosis-related protein is a protein having the function of suppressively participating in apoptosis. The PI3K signaling pathway-related protein is a protein, except for Akt1, included in proteins involved in the PI3K/AKT signaling pathway.

[0073] Also, the protein having the function of regulating cell cycle is meant to include every protein involved in cell cycle consisting of the G1 phase (resting stage before DNA replication), the S phase (DNA synthesis stage), G2 (resting stage before cell division), and the M phase (cell division stage). More specifically, examples of the regulation of cell cycle can include each event of the regulation of the mechanism of promoting the G1 phase the S phase the G2 phase the M phase in order, the regulation of progression at the G1 phase to the S phase, and the regulation of progression at the G2 phase to the M phase. Thus, the cell cycle-regulating protein can be, for example, a protein that participates in the progression of these events in cell cycle and a protein that positively or negatively regulates these events. Further specifically, examples of the cell cycle-regulating protein include cyclin-dependent kinases (CDKs) essential for the initiation of the S phase and the M phase. The activity of the cyclin-dependent kinases is positively regulated by the binding of cyclins. Also, the activity of the cyclin-dependent kinases is negatively regulated by cyclin-dependent kinase inhibitors (CKIs) such as p21 (CIP1/WAF1) and tyrosine kinases. Thus, these proteins regulating the activity of the cyclin-dependent kinases, i.e., cyclins, cyclin-dependent kinase inhibitors (such as p21), and tyrosine kinases, are also included in the cell cycle-regulating protein.

[0074] Specifically, examples of the cell cycle-regulating protein that exhibits synthetic lethality when inhibited together with GST-π can include at least one cell cycle-regulating protein selected from the group consisting of ATM, CDC25A, p21, PRKDC, RBBP8, SKP2, MCM10, RNPC1, CCNL1, CENPH, BRSK1, MCM8, CCNB3, MCMDC1 and MYLK. Of these 15 types of cell cycle-regulating proteins, one type of cell cycle-regulating protein may be inhibited together with GST-π, or two or more types of cell cycle-regulating proteins may be inhibited together with GST-π.

[0075] Particularly, it is preferable for the cell cycle-regulating protein that at least one cell cycle-regulating protein selected from the group consisting of p21, RNPC1, CCNL1, MCM8, CCNB3, and MCMDC1 should be inhibited together with GST-π. These 6 types of cell cycle-regulating proteins have a relatively low rate of cell growth inhibition when inhibited each alone, and exhibit a remarkably high cell growth-inhibiting effect only when inhibited together with GST-π. That is, it can be said that a drug inhibiting any of these 6 types of cell cycle-regulating proteins is excellent in safety by itself. Thus, it is preferable that the cell cycle-regulating protein that exhibits synthetic lethality when inhibited together with GST-π should be selected from these 6 types of cell cycle-regulating proteins.

[0076] p21 is a cell cycle-regulating protein that is encoded by CDKN1A gene and belongs to the CIP/KIP family. This protein has the function of inhibiting cell cycle progression at the G1 phase and the G2/M phase by inhibiting the effect of a cyclin-CDK complex through binding to the complex. Specifically, the p21 gene undergoes activation by p53 (one of tumor suppressor genes). It has been reported that upon activation of p53 due to DNA damage or the like, p53 activates p21 so that the cell cycle is arrested at the G1 phase and the G2/M phase. In addition, p21 also has the function of inhibiting apoptosis and has been reported to have the effect of protecting a cell from apoptosis induced by a chemotherapeutic agent or the like in in vitro and animal experiments (Gartel and Tyner, 2002; and Abbs and Dutta, 2009). p21 is present in various animals including humans, and its sequence information is also publicly known (e.g., human: NM 000389.4, NM 078467.2, NM 001291549.1, NM 001220778.1, NM 001220777.1 (NP 001207707.1, NP 001278478.1, NP 001207706.1, NP 510867.1, NP 000380.1), etc.; the numbers represent accession numbers of the NCBI database, and the nucleotide sequence and the amino acid sequence are indicated outside and inside the parentheses, respectively). As one example, the nucleotide sequence of the human CDKN1A gene registered in the database as NM_000389.4 is shown in SEQ ID NO: 3, and the amino acid sequence of the human p21 protein encoded by this human CDKN1A gene is shown in SEQ ID NO: 4. In the present specification, p21 is not limited to a protein consisting of the amino acid sequence of SEQ ID NO: 4 encoded by the nucleotide sequence of SEQ ID NO: 3. As for p21, sequence information has been registered with a plurality of accession numbers as mentioned above, and a plurality of transcript variants are present. The nucleotide sequence of SEQ ID NO: 3 represents the nucleotide sequence of one of these transcript variants.

[0077] RNPC1 is an RNA-binding protein encoded by RNPC1 gene and refers to a protein that is targeted by p53. RNPC1 is present in various animals including humans, and its sequence information is also publicly known (e.g., human: NM_017495.5, NM_183425.2, NM_001291780.1, XM_005260446.1 (XP_005260503.1, NP_059965.2, NP_906270.1, NP_001278709.1), etc.; the numbers represent accession numbers of the NCBI database, and the basic acid sequence and the amino acid sequence are indicated outside and inside the parentheses, respectively). As one example, the nucleotide sequence of the human RNPC1 gene registered in the database as NM_017495.5 is shown in SEQ ID NO: 5, and the amino acid sequence of the human RNPC1 protein encoded by this human RNPC1 gene is shown in SEQ ID NO: 6. In the present specification, RNPC1 is not limited to a protein consisting of the amino acid sequence of SEQ ID NO: 6 encoded by the nucleotide sequence of SEQ ID NO: 5. As for RNPC1, sequence information has been registered with a plurality of accession numbers as mentioned above, and a plurality of transcript variants are present. The nucleotide sequence of SEQ ID NO: 5 represents the nucleotide sequence of one of these transcript variants.

[0078] CCNL1 refers to cyclin-L1 encoded by CCNL1 gene. CCNL1 is present in various animals including humans, and its sequence information is also publicly known (e.g., human: NM_020307.2, XM_005247647.2, XM_005247648.1, XM_005247649.1, XM_005247650.1, XM_005247651.1, XM_006713710.1, XM_006713711.1 (XP_005247704.1, XP_005247705.1, XP_005247706.1, XP_005247707.1, XP_005247708.1, XP_006713773.1, NP_064703.1), etc.; the numbers represent accession numbers of the NCBI database, and the nucleotide sequence and the amino acid sequence are indicated outside and inside the parentheses, respectively). As one example, the nucleotide sequence of the human CCNL1 gene registered in the database as NM_020307.2 is shown in SEQ ID NO: 7, and the amino acid sequence of the human CCNL1 protein encoded by this human CCNL1 gene is shown in SEQ ID NO: 8. In the present specification, CCNL1 is not limited to a protein consisting of the amino acid sequence of SEQ ID NO: 8 encoded by the nucleotide sequence of SEQ ID NO: 7. As for CCNL1, sequence information has been registered with a plurality of accession numbers as mentioned above, and a plurality of transcript variants are present. The nucleotide sequence of SEQ ID NO: 7 represents the nucleotide sequence of one of these transcript variants.

[0079] MCM8 refers to mini-chromosome maintenance 8 encoded by MCM8 gene. MCM8 is present in various animals including humans, and its sequence information is also publicly known (e.g., human: NM_032485.5, NM_182802.2, NM_001281520.1, NM_001281521.1, NM_001281522.1, XM_005260859.1 (XP_005260916.1, NP_115874.3, NP_001268449.1, NP_877954.1, NP_001268450.1, NP_001268451.1), etc.; the numbers represent accession numbers of the NCBI database, and the nucleotide sequence and the amino acid sequence are indicated outside and inside the parentheses, respectively). As one example, the nucleotide sequence of the human MCM8 gene registered in the database as NM_032485.5 is shown in SEQ ID NO: 9, and the amino acid sequence of the human MCM8 protein encoded by this human MCM8 gene is shown in SEQ ID NO: 10. In the present specification, MCM8 is not limited to a protein consisting of the amino acid sequence of SEQ ID NO: 10 encoded by the nucleotide sequence of SEQ ID NO: 9. As for MCM8, sequence information has been registered with a plurality of accession numbers as mentioned above, and a plurality of transcript variants are present. The nucleotide sequence of SEQ ID NO: 9 represents the nucleotide sequence of one of these transcript variants.

[0080] CCNB3 refers to cyclin-B3 encoded by CCNB3 gene. CCNB3 is present in various animals including humans, and its sequence information is also publicly known (e.g., human: NM_033670.2, NM_033031.2, XM_006724610.1 (NP_391990.1, NP_149020.2, XP_006724673.1), etc.; the numbers represent accession numbers of the NCBI database, and the nucleotide sequence and the amino acid sequence are indicated outside and inside the parentheses, respectively). As one example, the nucleotide sequence of the human CCNB3 gene registered in the database as NM_033670.2 is shown in SEQ ID NO: 11, and the amino acid sequence of the human CCNB3 protein encoded by this human CCNB3 gene is shown in SEQ ID NO: 12. In the present specification, CCNB3 is not limited to a protein consisting of the amino acid sequence of SEQ ID NO: 12 encoded by the nucleotide sequence of SEQ ID NO: 11. As for CCNB3, sequence information has been registered with a plurality of accession numbers as mentioned above, and a plurality of transcript variants are present. The nucleotide sequence of SEQ ID NO: 11 represents the nucleotide sequence of one of these transcript variants.

[0081] MCMDC1 refers to mini-chromosome maintenance deficient domain containing 1 encoded by MCMDC1 gene. MCMDC1 is present in various animals including humans, and its sequence information is also publicly known (e.g., human: NM_017696.2, NM_153255.4 (NP_060166.2, NP_694987.1), etc.; the numbers represent accession numbers of the NCBI database, and the nucleotide sequence and the amino acid sequence are indicated outside and inside the parentheses, respectively). As one example, the nucleotide sequence of the human MCMDC1 gene registered in the database as NM_017696.2 is shown in SEQ ID NO: 13, and the amino acid sequence of the human MCMDC1 protein encoded by this human MCMDC1 gene is shown in SEQ ID NO: 14. In the present specification, MCMDC1 is not limited to a protein consisting of the amino acid sequence of SEQ ID NO: 14 encoded by the nucleotide sequence of SEQ ID NO: 13. As for MCMDC1, sequence information has been registered with a plurality of accession numbers as mentioned above, and a plurality of transcript variants are present. The nucleotide sequence of SEQ ID NO: 13 represents the nucleotide sequence of one of these transcript variants.

[0082] ATM is ATM serine/threonine kinase encoded by ATM gene and refers to a protein that belongs to the PI3/PI4 kinase family. ATM is present in various animals including humans, and its sequence information is also publicly known (e.g., human: NM_000051.3, XM_005271561.2, XM_005271562.2, XM_005271564.2, XM_006718843.1, XM_006718844.1, XM_006718845.1 (NP_000042.3, XP_005271618.2, XP_005271619.2, XP_005271621.2, XP_006718906.1, XP_006718907.1, XP_006718908.1), etc.; the numbers represent accession numbers of the NCBI database, and the nucleotide sequence and the amino acid sequence are indicated outside and inside the parentheses, respectively). As one example, the nucleotide sequence of the human ATM gene registered in the database as NM_000051.3 is shown in SEQ ID NO: 15, and the amino acid sequence of the human ATM protein encoded by this human ATM gene is shown in SEQ ID NO: 16. In the present specification, ATM is not limited to a protein consisting of the amino acid sequence of SEQ ID NO: 16 encoded by the nucleotide sequence of SEQ ID NO: 15. As for ATM, sequence information has been registered with a plurality of accession numbers as mentioned above, and a plurality of transcript variants are present. The nucleotide sequence of SEQ ID NO: 15 represents the nucleotide sequence of one of these transcript variants.

[0083] CDC25A is phosphatase that is encoded by CDC25A gene and belongs to the CDC25 family, and refers to a protein that activates CDC2 by dephosphorylation. CDC25A is present in various animals including humans, and its sequence information is also publicly known (e.g., human: NM_001789.2, NM_201567.1, XM_006713434.1, XM_006713435.1, XM_006713436.1 (NP_001780.2, NP_963861.1, XP_006713497.1, XP_006713498.1, XP_006713499.1), etc.; the numbers represent accession numbers of the NCBI database, and the nucleotide sequence and the amino acid sequence are indicated outside and inside the parentheses, respectively). As one example, the nucleotide sequence of the human CDC25A gene registered in the database as NM_001789.2 is shown in SEQ ID NO: 17, and the amino acid sequence of the human CDC25A protein encoded by this human CDC25A gene is shown in SEQ ID NO: 18. In the present specification, CDC25A is not limited to a protein consisting of the amino acid sequence of SEQ ID NO: 18 encoded by the nucleotide sequence of SEQ ID NO: 17. As for CDC25A, sequence information has been registered with a plurality of accession numbers as mentioned above, and a plurality of transcript variants are present. The nucleotide sequence of SEQ ID NO: 17 represents the nucleotide sequence of one of these transcript variants.

[0084] PRKDC is a catalytic subunit protein of DNA-dependent protein kinase encoded by PRKDC gene and refers to a protein that belongs to the PI3/PI4 kinase family. PRKDC is present in various animals including humans, and its sequence information is also publicly known (e.g., human: NM_006904.6, NM_001081640.1 (NP_008835.5, NP_001075109.1), etc.; the numbers represent accession numbers of the NCBI database, and the basic acid sequence and the amino acid sequence are indicated outside and inside the parentheses, respectively). As one example, the nucleotide sequence of the human PRKDC gene registered in the database as NM_006904.6 is shown in SEQ ID NO: 19, and the amino acid sequence of the human PRKDC protein encoded by this human PRKDC gene is shown in SEQ ID NO: 20. In the present specification, PRKDC is not limited to a protein consisting of the amino acid sequence of SEQ ID NO: 20 encoded by the nucleotide sequence of SEQ ID NO: 19. As for PRKDC, sequence information has been registered with a plurality of accession numbers as mentioned above, and a plurality of transcript variants are present. The nucleotide sequence of SEQ ID NO: 19 represents the nucleotide sequence of one of these transcript variants.

[0085] RBBP8 is retinoblastoma binding protein 8 encoded by RBBP8 gene and refers to a nuclear protein that binds directly to retinoblastoma protein. RBBP8 is present in various animals including humans, and its sequence information is also publicly known (e.g., human: NM_002894.2, NM_203291.1, NM_203292.1, XM_005258325.1, XM_005258326.1, XM_006722519.1, XM_006722520.1, XM_006722521.1, XM_006722522.1 (NP_002885.1, NP_976036.1, NP_976037.1, XP_005258382.1, XP_005258383.1, XP_006722582.1, XP_006722583.1, XP_006722584.1, XP_006722585.1), etc.; the numbers represent accession numbers of the NCBI database, and the nucleotide sequence and the amino acid sequence are indicated outside and inside the parentheses, respectively). As one example, the nucleotide sequence of the human RBBP8 gene registered in the database as NM_002894.2 is shown in SEQ ID NO: 21, and the amino acid sequence of the human RBBP8 protein encoded by this human RBBP8 gene is shown in SEQ ID NO: 22. In the present specification, RBBP8 is not limited to a protein consisting of the amino acid sequence of SEQ ID NO: 22 encoded by the nucleotide sequence of SEQ ID NO: 21. As for RBBP8, sequence information has been registered with a plurality of accession numbers as mentioned above, and a plurality of transcript variants are present. The nucleotide sequence of SEQ ID NO: 21 represents the nucleotide sequence of one of these transcript variants.

[0086] SKP2 is S-phase kinase-associated protein 2 encoded by SKP2 gene and refers to a protein that belongs to the Fbox protein, which is one of four subunits of E3 ubiquitin protein ligase. SKP2 is present in various animals including humans, and its sequence information is also publicly known (e.g., human: NM_005983.3, NM_032637.3, NM_001243120.1, XM_006714487.1 (NP_005974.2, NP_116026.1, NP_001230049.1, XP_006714550.1), etc.; the numbers represent accession numbers of the NCBI database, and the nucleotide sequence and the amino acid sequence are indicated outside and inside the parentheses, respectively). As one example, the nucleotide sequence of the coding region of the human SKP2 gene registered in the database as NM_005983.3 is shown in SEQ ID NO: 23, and the amino acid sequence of the human SKP2 protein encoded by this human SKP2 gene is shown in SEQ ID NO: 24. In the present specification, SKP2 is not limited to a protein consisting of the amino acid sequence of SEQ ID NO: 24 encoded by the nucleotide sequence of SEQ ID NO: 23. As for SKP2, sequence information has been registered with a plurality of accession numbers as mentioned above, and a plurality of transcript variants are present. The nucleotide sequence of SEQ ID NO: 23 represents the nucleotide sequence of one of these transcript variants.

[0087] MCM10 refers to mini-chromosome maintenance 10 encoded by MCM10 gene. MCM10 is present in various animals including humans, and its sequence information is also publicly known (e.g., human: NM_182751.2, NM_018518.4 (NP_877428.1, NP_060988.3), etc.; the numbers represent accession numbers of the NCBI database, and the nucleotide sequence and the amino acid sequence are indicated outside and inside the parentheses, respectively). As one example, the nucleotide sequence of the human MCM10 gene registered in the database as NM_182751.2 is shown in SEQ ID NO: 25, and the amino acid sequence of the human MCM10 protein encoded by this human MCM10 gene is shown in SEQ ID NO: 26. In the present specification, MCM10 is not limited to a protein consisting of the amino acid sequence of SEQ ID NO: 26 encoded by the nucleotide sequence of SEQ ID NO: 25. As for MCM10, sequence information has been registered with a plurality of accession numbers as mentioned above, and a plurality of transcript variants are present. The nucleotide sequence of SEQ ID NO: 25 represents the nucleotide sequence of one of these transcript variants.

[0088] CENPH is centromere protein H encoded by CENPH gene and refers to one of proteins constituting activated kinetochore located on the centromere. CENPH is present in various animals including humans, and its sequence information is also publicly known (e.g., human: NM_022909.3 (NP_075060.1), etc.; the numbers represent accession numbers of the NCBI database, and the nucleotide sequence and the amino acid sequence are indicated outside and inside the parentheses, respectively). As one example, the nucleotide sequence of the human CENPH gene registered in the database as NM_022909.3 is shown in SEQ ID NO: 27, and the amino acid sequence of the human CENPH protein encoded by this human CENPH gene is shown in SEQ ID NO: 28. In the present specification, CENPH is not limited to a protein consisting of the amino acid sequence of SEQ ID NO: 28 encoded by the nucleotide sequence of SEQ ID NO: 27. As for CENPH, there is the possibility that a plurality of transcript variants are present. The nucleotide sequence of SEQ ID NO: 27 represents the nucleotide sequence of a transcript variant.

[0089] BRSK1 is serine/threonine kinase encoded by BRSK1 gene and refers to kinase that acts at cell cycle checkpoint in DNA damage. BRSK1 is present in various animals including humans, and its sequence information is also publicly known (e.g., human: NM_032430.1, XM_005259327.1, XR_430213.1 (NP_115806.1, XP_005259384.1), etc.; the numbers represent accession numbers of the NCBI database, and the nucleotide sequence and the amino acid sequence are indicated outside and inside the parentheses, respectively). As one example, the nucleotide sequence of the human BRSK1 gene registered in the database as NM_032430.1 is shown in SEQ ID NO: 29, and the amino acid sequence of the human BRSK1 protein encoded by this human BRSK1 gene is shown in SEQ ID NO: 30. In the present specification, BRSK1 is not limited to a protein consisting of the amino acid sequence of SEQ ID NO: 30 encoded by the nucleotide sequence of SEQ ID NO: 29. As for BRSK1, sequence information has been registered with a plurality of accession numbers as mentioned above, and a plurality of transcript variants are present. The nucleotide sequence of SEQ ID NO: 29 represents the nucleotide sequence of one of these transcript variants.

[0090] MYLK, myosin light chain kinase, is a calcium/calmodulin-dependent enzyme that phosphorylates myosin regulatory light chains so that myosin interaction with actin filaments is facilitated to produce contractile activity. The gene encoding MYLK encodes both smooth muscle and non-muscle isoforms. MYLK is present in various animals including humans, and its sequence information is also publicly known (e.g., human: NM_053028.3, NM_053026.3, NM_053027.3, NM_053025.3, NM_053031.2, NM_053032.2, XM_011512862.1, XM_011512861.1, XM_011512860.1 (NP_444256.3, NP_444254.3, NP_444255.3, NP_444253.3, NP_444259.1, NP_444260.1, XP_011511164.1, XP_011511163.1, XP_011511162.1), etc.; the numbers represent accession numbers of the NCBI database, and the nucleotide sequence and the amino acid sequence are indicated outside and inside the parentheses, respectively). As one example, the nucleotide sequence of the human MYLK gene registered in the database as NM_053028.3 is shown in SEQ ID NO: 41, and the amino acid sequence of the human MYLK protein encoded by this human MYLK gene is shown in SEQ ID NO: 42. In the present specification, MYLK is not limited to a protein consisting of the amino acid sequence of SEQ ID NO: 42 encoded by the nucleotide sequence of SEQ ID NO: 41. As for MYLK, sequence information has been registered with a plurality of accession numbers as mentioned above, and a plurality of transcript variants are present. The nucleotide sequence of SEQ ID NO: 41 represents the nucleotide sequence of one of these transcript variants.

[0091] On the other hand, the protein having the function of suppressively participating in apoptosis means a protein having the function of inhibiting apoptosis by inhibiting mechanisms such as karyopyknosis, cell contraction, membrane blebbing, and DNA fragmentation. The function of suppressively participating in apoptosis is meant to include both of the function of inhibiting apoptosis and the function of inhibiting a factor promoting apoptosis. Examples of the factor promoting apoptosis can include many factors such as caspase, Fas, and TNFR.

[0092] Specifically, examples of the anti-apoptosis-related protein that exhibits synthetic lethality when inhibited together with GST-π can include at least one anti-apoptosis-related protein selected from the group consisting of AATF, ALOX12, ANXA1, ANXA4, API5, ATF5, AVEN, AZU1, BAG1, BCL2L1, BFAR, CFLAR, IL2, MALT1, MCL1, MKL1, MPO, MTL5, MYBL2, and MYO18A. Of these 20 types of anti-apoptosis-related proteins, one type of anti-apoptosis-related protein may be inhibited together with GST-π, or two or more types of anti-apoptosis-related proteins may be inhibited together with GST-π.

[0093] AATF was identified on the basis of its interaction with MAP3K12/DLK, a protein kinase known to be involved in the induction of cell apoptosis. AATF contains a leucine zipper, which is a characteristic motif of transcription factors, and has been shown to exhibit strong transactivation activity when fused to Gal4 DNA-binding domain. Overexpression of the gene encoding AATF is known to inhibit MAP3K12-induced apoptosis. AATF is present in various animals including humans, and its sequence information is also publicly known (e.g., human: NM_012138.3, XM_011546799.1, XM_011524611.1, XR_951958.1, XR_934439.1 (NP_036270.1, XP_011545101.1, XP_011522913.1), etc.; the numbers represent accession numbers of the NCBI database, and the nucleotide sequence and the amino acid sequence are indicated outside and inside the parentheses, respectively). As one example, the nucleotide sequence of the human AATF gene registered in the database as NM_012138.3 is shown in SEQ ID NO: 39, and the amino acid sequence of the human AATF protein encoded by this human AATF gene is shown in SEQ ID NO: 40. In the present specification, AATF is not limited to a protein consisting of the amino acid sequence of SEQ ID NO: 40 encoded by the nucleotide sequence of SEQ ID NO: 39. As for AATF, sequence information has been registered with a plurality of accession numbers as mentioned above, and a plurality of transcript variants are present. The nucleotide sequence of SEQ ID NO: 39 represents the nucleotide sequence of one of these transcript variants.

[0094] ALOX12, arachidonate 12-lipoxygenase, is known to be involved in atherosclerosis, osteoporosis, and the like. ALOX12 is also known to positively regulate angiogenesis through regulation of the expression of the vascular endothelial growth factor and to play a role in apoptotic process by promoting the survival of vascular smooth muscle cells or the like. ALOX12 is present in various animals including humans, and its sequence information is also publicly known (e.g., human: NM_000697.2, XM_011523780.1 (NP_000688.2, XP_011522082.1, AAH69557.1), etc.; the numbers represent accession numbers of the NCBI database, and the nucleotide sequence and the amino acid sequence are indicated outside and inside the parentheses, respectively). As one example, the nucleotide sequence of the human ALOX12 gene registered in the database as NM_000697.2 is shown in SEQ ID NO: 43, and the amino acid sequence of the human ALOX12 protein encoded by this human ALOX12 gene is shown in SEQ ID NO: 44. In the present specification, ALOX12 is not limited to a protein consisting of the amino acid sequence of SEQ ID NO: 44 encoded by the nucleotide sequence of SEQ ID NO: 43. As for ALOX12, sequence information has been registered with a plurality of accession numbers as mentioned above, and a plurality of transcript variants are present. The nucleotide sequence of SEQ ID NO: 43 represents the nucleotide sequence of one of these transcript variants.

[0095] ANXA1 is a membrane-localized protein that binds to phospholipids. ANXA1 inhibits phospholipase A2 and has anti-inflammatory activity. ANXA1 is present in various animals including humans, and its sequence information is also publicly known (e.g., human: NM_000700.2, XM_011518609.1, XM_011518608.1 (NP_000691.1, AAH34157.1), etc.; the numbers represent accession numbers of the NCBI database, and the nucleotide sequence and the amino acid sequence are indicated outside and inside the parentheses, respectively). As one example, the nucleotide sequence of the human ANXA1 gene registered in the database as NM_000700.2 is shown in SEQ ID NO: 45, and the amino acid sequence of the human ANXA1 protein encoded by this human ANXA1 gene is shown in SEQ ID NO: 46. In the present specification, ANXA1 is not limited to a protein consisting of the amino acid sequence of SEQ ID NO: 46 encoded by the nucleotide sequence of SEQ ID NO: 45. As for ANXA1, sequence information has been registered with a plurality of accession numbers as mentioned above, and a plurality of transcript variants are present. The nucleotide sequence of SEQ ID NO: 45 represents the nucleotide sequence of one of these transcript variants.

[0096] ANXA4 belongs to the annexin family of calcium-dependent phospholipid-binding proteins. This protein has possible interactions with ATP and is known to have in vitro anticoagulant activity and to inhibit phospholipase A2. ANXA4 is present in various animals including humans, and its sequence information is also publicly known (e.g., human: NM_001153.3, XM_011532805.1 (NP_001144.1, XP_011531107.1, AAH63672.1, AAH00182.1, AAH11659.1), etc.; the numbers represent accession numbers of the NCBI database, and the nucleotide sequence and the amino acid sequence are indicated outside and inside the parentheses, respectively). As one example, the nucleotide sequence of the human ANXA4 gene registered in the database as NM_001153.3 is shown in SEQ ID NO: 47, and the amino acid sequence of the human ANXA4 protein encoded by this human ANXA4 gene is shown in SEQ ID NO: 48. In the present specification, ANXA4 is not limited to a protein consisting of the amino acid sequence of SEQ ID NO: 48 encoded by the nucleotide sequence of SEQ ID NO: 47. As for ANXA4, sequence information has been registered with a plurality of accession numbers as mentioned above, and a plurality of transcript variants are present. The nucleotide sequence of SEQ ID NO: 47 represents the nucleotide sequence of one of these transcript variants.

[0097] API5 is an apoptosis inhibitory protein whose expression is known to prevent apoptosis after growth factor deprivation. API5 suppresses the transcription factor E2F1-induced apoptosis and also interacts with and negatively regulates Acinus, a nuclear factor involved in apoptotic DNA fragmentation. API5 is present in various animals including humans, and its sequence information is also publicly known (e.g., human: NM_001142930.1, NM_006595.3, NM_001243747.1, NM_001142931.1, XM_006718359.2, NR_024625.1 (NP_001136402.1, NP_001136403.1, NP_001230676.1, NP_006586.1, XP_006718422.1), etc.; the numbers represent accession numbers of the NCBI database, and the nucleotide sequence and the amino acid sequence are indicated outside and inside the parentheses, respectively). As one example, the nucleotide sequence of the human API5 gene registered in the database as NM_001142930.1 is shown in SEQ ID NO: 49, and the amino acid sequence of the human API5 protein encoded by this human API5 gene is shown in SEQ ID NO: 50. In the present specification, API5 is not limited to a protein consisting of the amino acid sequence of SEQ ID NO: 50 encoded by the nucleotide sequence of SEQ ID NO: 49. As for API5, sequence information has been registered with a plurality of accession numbers as mentioned above, and a plurality of transcript variants are present. The nucleotide sequence of SEQ ID NO: 49 represents the nucleotide sequence of one of these transcript variants.

[0098] ATF5 is known to be involved in diseases caused by human T-cell leukemia virus type 1. ATF5 is a transcriptional activator that binds to the cAMP response element (CRE) present in many viral promoters, etc., and is known to inhibit the differentiation of neuroprogenitor cells into neurons. ATF5 is present in various animals including humans, and its sequence information is also publicly known (e.g., human: NM_012068.5, NM_001193646.1, NM_001290746.1, XM_011526629.1 (NP_036200.2, NP_001277675.1, NP_001180575.1, XP_011524931.1), etc.; the numbers represent accession numbers of the NCBI database, and the nucleotide sequence and the amino acid sequence are indicated outside and inside the parentheses, respectively). As one example, the nucleotide sequence of the human ATF5 gene registered in the database as NM_012068.5 is shown in SEQ ID NO: 51, and the amino acid sequence of the human ATF5 protein encoded by this human ATF5 gene is shown in SEQ ID NO: 52. In the present specification, ATF5 is not limited to a protein consisting of the amino acid sequence of SEQ ID NO: 52 encoded by the nucleotide sequence of SEQ ID NO: 51. As for ATF5, sequence information has been registered with a plurality of accession numbers as mentioned above, and a plurality of transcript variants are present. The nucleotide sequence of SEQ ID NO: 51 represents the nucleotide sequence of one of these transcript variants.

[0099] AVEN is a protein known as an apoptosis, caspase activation inhibitor and is known to be involved in schizoid personality disorder and alexithymia. AVEN is also known to inhibit apoptosis mediated by Apaf-1. AVEN is present in various animals including humans, and its sequence information is also publicly known (e.g., human: NM_020371.2, XM_011521820.1, XM_005254563.2, XM_011521819.1, XM_011521818.1 (NP NP_065104.1, XP_011520122.1, XP_011520121.1, XP_011520120.1, XP_005254620.1, AAH63533.1, AAF91470.1), etc.; the numbers represent accession numbers of the NCBI database, and the nucleotide sequence and the amino acid sequence are indicated outside and inside the parentheses, respectively). As one example, the nucleotide sequence of the human AVEN gene registered in the database as NM_020371.2 is shown in SEQ ID NO: 53, and the amino acid sequence of the human AVEN protein encoded by this human AVEN gene is shown in SEQ ID NO: 54. In the present specification, AVEN is not limited to a protein consisting of the amino acid sequence of SEQ ID NO: 54 encoded by the nucleotide sequence of SEQ ID NO: 53. As for AVEN, sequence information has been registered with a plurality of accession numbers as mentioned above, and a plurality of transcript variants are present. The nucleotide sequence of SEQ ID NO: 53 represents the nucleotide sequence of one of these transcript variants.

[0100] AZU1 is a protein contained in azurophil granules and has monocyte chemotactic and antimicrobial activity. AZU1 is an important multifunctional inflammatory mediator. AZU1 is present in various animals including humans, and its sequence information is also publicly known (e.g., human: NM_001700.3 (NP_001691.1, EAW69592.1, AAH93933.1, AAH93931.1, AAH69495.1), etc.; the numbers represent accession numbers of the NCBI database, and the nucleotide sequence and the amino acid sequence are indicated outside and inside the parentheses, respectively). As one example, the nucleotide sequence of the human AZU1 gene registered in the database as NM_001700.3 is shown in SEQ ID NO: 55, and the amino acid sequence of the human AZU1 protein encoded by this human AZU1 gene is shown in SEQ ID NO: 56. In the present specification, AZU1 is not limited to a protein consisting of the amino acid sequence of SEQ ID NO: 56 encoded by the nucleotide sequence of SEQ ID NO: 55. As for AZU1, sequence information has been registered with a plurality of accession numbers as mentioned above, and a plurality of transcript variants are present. The nucleotide sequence of SEQ ID NO: 55 represents the nucleotide sequence of one of these transcript variants.

[0101] BAG1 binds to BCL2, a membrane protein that inhibits a pathway leading to apoptosis or programmed cell death. BAG1 enhances the anti-apoptotic effects of BCL2 and represents a link between growth factor receptors and anti-apoptotic mechanisms. BAG1 is present in various animals including humans, and its sequence information is also publicly known (e.g., human: NM_004323.5, NM_001172415.1 (NP_004314.5, NP_001165886.1, AAH14774.2), etc.; the numbers represent accession numbers of the NCBI database, and the nucleotide sequence and the amino acid sequence are indicated outside and inside the parentheses, respectively). As one example, the nucleotide sequence of the human BAG1 gene registered in the database as NM_004323.5 is shown in SEQ ID NO: 57, and the amino acid sequence of the human BAG1 protein encoded by this human BAG1 gene is shown in SEQ ID NO: 58. In the present specification, BAG1 is not limited to a protein consisting of the amino acid sequence of SEQ ID NO: 58 encoded by the nucleotide sequence of SEQ ID NO: 57. As for BAG1, sequence information has been registered with a plurality of accession numbers as mentioned above, and a plurality of transcript variants are present. The nucleotide sequence of SEQ ID NO: 57 represents the nucleotide sequence of one of these transcript variants.

[0102] BCL2L1 belongs to the BCL-2 protein family. Members of this protein family form hetero- or homodimers and act as anti- or pro-apoptotic regulators that are involved in a wide variety of cellular activities. BCL2L1 is located at the outer mitochondrial membrane and has been shown to regulate outer mitochondrial membrane channel opening. BCL2L1 is present in various animals including humans, and its sequence information is also publicly known (e.g., human: NM_138578.1, NM_001191.2, XM_011528966.1, XM_011528965.1, XM_011528961.1, XM_011528960.1, XM_011528964.1, XM_011528963.1, XM_011528962.1, XM_005260487.3, XM_005260486.2 (NP_612815.1, NP_001182.1, AAH19307.1, XP_011527268.1, XP_011527267.1, XP_011527266.1, XP_011527265.1, XP_011527264.1, XP_011527263.1, XP_011527262.1, XP_005260544.1, XP_005260543.1), etc.; the numbers represent accession numbers of the NCBI database, and the nucleotide sequence and the amino acid sequence are indicated outside and inside the parentheses, respectively). As one example, the nucleotide sequence of the human BCL2L1 gene registered in the database as NM_138578.1 is shown in SEQ ID NO: 59, and the amino acid sequence of the human BCL2L1 protein encoded by this human BCL2L1 gene is shown in SEQ ID NO: 60. In the present specification, BCL2L1 is not limited to a protein consisting of the amino acid sequence of SEQ ID NO: 60 encoded by the nucleotide sequence of SEQ ID NO: 59. As for BCL2L1, sequence information has been registered with a plurality of accession numbers as mentioned above, and a plurality of transcript variants are present. The nucleotide sequence of SEQ ID NO: 59 represents the nucleotide sequence of one of these transcript variants.

[0103] BFAR, a bifunctional apoptosis regulator, has anti-apoptotic activity, both against apoptosis triggered via cell death-receptors and against apoptosis triggered via mitochondrial factors. BFAR is present in various animals including humans, and its sequence information is also publicly known (e.g., human: NM_016561.2, XM_006725196.2, XM_011546704.1, XM_005255350.2, XM_011522520.1 (NP_057645.1, XP_011545006.1, XP_011520822.1, XP_006725259.1, XP_005255407.1, AAH03054.1), etc.; the numbers represent accession numbers of the NCBI database, and the nucleotide sequence and the amino acid sequence are indicated outside and inside the parentheses, respectively). As one example, the nucleotide sequence of the human BFAR gene registered in the database as NM_016561.2 is shown in SEQ ID NO: 61, and the amino acid sequence of the human BFAR protein encoded by this human BFAR gene is shown in SEQ ID NO: 62. In the present specification, BFAR is not limited to a protein consisting of the amino acid sequence of SEQ ID NO: 62 encoded by the nucleotide sequence of SEQ ID NO: 61. As for BFAR, sequence information has been registered with a plurality of accession numbers as mentioned above, and a plurality of transcript variants are present. The nucleotide sequence of SEQ ID NO: 61 represents the nucleotide sequence of one of these transcript variants.

[0104] CFLAR, a regulator of apoptosis, is known to be structurally similar to caspase-8. However, CFLAR lacks caspase activity and is cleaved into two peptides by caspase-8. CFLAR is present in various animals including humans, and its sequence information is also publicly known (e.g., human: NM_003879.5, NM_001202519.1, NM_001202518.1, NM_001308043.1, NM_001308042.1, NM_001202517.1, NM_001202516.1, NM_001127184.2, NM_001202515.1, NM_001127183.2, XM_011512100.1 (NP_003870.4, NP_001294972.1, NP_001294971.1, NP_001189448.1, NP_001189446.1, NP_001189445.1, NP_001189444.1, NP_001120656.1, XP_011510402.1), etc.; the numbers represent accession numbers of the NCBI database, and the nucleotide sequence and the amino acid sequence are indicated outside and inside the parentheses, respectively). As one example, the nucleotide sequence of the human CFLAR gene registered in the database as NM_003879.5 is shown in SEQ ID NO: 63, and the amino acid sequence of the human CFLAR protein encoded by this human CFLAR gene is shown in SEQ ID NO: 64. In the present specification, CFLAR is not limited to a protein consisting of the amino acid sequence of SEQ ID NO: 64 encoded by the nucleotide sequence of SEQ ID NO: 63. As for CFLAR, sequence information has been registered with a plurality of accession numbers as mentioned above, and a plurality of transcript variants are present. The nucleotide sequence of SEQ ID NO: 63 represents the nucleotide sequence of one of these transcript variants.

[0105] IL2, interleukin 2, is a secreted cytokine that is important for the proliferation of T and B lymphocytes. IL2 is present in various animals including humans, and its sequence information is also publicly known (e.g., human: NM_000586.3 (NP_000577.2), etc.; the numbers represent accession numbers of the NCBI database, and the nucleotide sequence and the amino acid sequence are indicated outside and inside the parentheses, respectively). As one example, the nucleotide sequence of the human IL2 gene registered in the database as NM_000586.3 is shown in SEQ ID NO: 65, and the amino acid sequence of the human IL2 protein encoded by this human IL2 gene is shown in SEQ ID NO: 66. In the present specification, IL2 is not limited to a protein consisting of the amino acid sequence of SEQ ID NO: 66 encoded by the nucleotide sequence of SEQ ID NO: 65. As for IL2, there is the possibility that a plurality of transcript variants are present. The nucleotide sequence of SEQ ID NO: 65 represents the nucleotide sequence of a transcript variant.

[0106] MALT1 is encoded by a gene that is recurrently rearranged in chromosomal translocation with baculoviral IAP repeat-containing protein 3 (also known as apoptosis inhibitor 2) and immunoglobulin heavy chain locus in mucosa-associated lymphoid tissue lymphomas. MALT1 may activate NFκB. MALT1 is present in various animals including humans, and its sequence information is also publicly known (e.g., human: NM_173844.2, NM_006785.3, XM_011525794.1 (NP_776216.1, NP_006776.1, XP_011524096.1), etc.; the numbers represent accession numbers of the NCBI database, and the nucleotide sequence and the amino acid sequence are indicated outside and inside the parentheses, respectively). As one example, the nucleotide sequence of the human MALT1 gene registered in the database as NM_006785.3 is shown in SEQ ID NO: 67, and the amino acid sequence of the human MALT1 protein encoded by this human MALT1 gene is shown in SEQ ID NO: 68. In the present specification, MALT1 is not limited to a protein consisting of the amino acid sequence of SEQ ID NO: 68 encoded by the nucleotide sequence of SEQ ID NO: 67. As for MALT1, sequence information has been registered with a plurality of accession numbers as mentioned above, and a plurality of transcript variants are present. The nucleotide sequence of SEQ ID NO: 67 represents the nucleotide sequence of one of these transcript variants.

[0107] MCL1 is an anti-apoptotic protein, which is a member of the Bcl-2 family. The longest variant resulting from the alternative splicing of the MCL1 gene enhances cell survival by inhibiting apoptosis, while the alternatively spliced shorter variants promote apoptosis and induce cell death. MCL1 is present in various animals including humans, and its sequence information is also publicly known (e.g., human: NM_021960.4, NM_001197320.1, NM_182763.2 (NP_068779.1, NP_001184249.1, NP_877495.1), etc.; the numbers represent accession numbers of the NCBI database, and the nucleotide sequence and the amino acid sequence are indicated outside and inside the parentheses, respectively). As one example, the nucleotide sequence of the human MCL1 gene registered in the database as NM_021960.4 is shown in SEQ ID NO: 69, and the amino acid sequence of the human MCL1 protein encoded by this human MCL1 gene is shown in SEQ ID NO: 70. In the present specification, MCL1 is not limited to a protein consisting of the amino acid sequence of SEQ ID NO: 70 encoded by the nucleotide sequence of SEQ ID NO: 69. As for MCL1, sequence information has been registered with a plurality of accession numbers as mentioned above, and a plurality of transcript variants are present. The nucleotide sequence of SEQ ID NO: 69 represents the nucleotide sequence of one of these transcript variants.

[0108] MKL1 is known to interact with the transcription factor myocardin, a key regulator of smooth muscle cell differentiation. MKL1 is predominantly nuclear and helps transduce signals from the cytoskeleton to the nucleus. The MKL1 gene is involved in a translocation event that creates a fusion of this gene and the RNA-binding motif protein-15 gene. MKL1 is present in various animals including humans, and its sequence information is also publicly known (e.g., human: NM_001282662.1, NM_001282660.1, NM_020831.4, NM_001282661.1, XM_011530287.1, XM_011530286.1, XM_011530285.1, XM_011530284.1, XM_011530283.1, XM_005261691.3 (NP_001269591.1, NP_001269589.1, NP_065882.1, NP_001269590.1, XP_011528589.1, XP_011528588.1, XP_011528587.1, XP_011528586.1, XP_011528585.1, XP_005261751.1, XP_005261749.1, XP_005261748.1), etc.; the numbers represent accession numbers of the NCBI database, and the nucleotide sequence and the amino acid sequence are indicated outside and inside the parentheses, respectively). As one example, the nucleotide sequence of the human MKL1 gene registered in the database as NM_001282662.1 is shown in SEQ ID NO: 71, and the amino acid sequence of the human MKL1 protein encoded by this human MKL1 gene is shown in SEQ ID NO: 72. In the present specification, MKL1 is not limited to a protein consisting of the amino acid sequence of SEQ ID NO: 72 encoded by the nucleotide sequence of SEQ ID NO: 71. As for MKL1, sequence information has been registered with a plurality of accession numbers as mentioned above, and a plurality of transcript variants are present. The nucleotide sequence of SEQ ID NO: 71 represents the nucleotide sequence of one of these transcript variants.

[0109] MPO, myeloperoxidase, is a heme protein that is synthesized during myeloid differentiation and constitutes the major component of neutrophil azurophil granules. MPO produces hypohalous acids central to the microbicidal activity of neutrophils. MPO is present in various animals including humans, and its sequence information is also publicly known (e.g., human: NM_000250.1, XM_011524823.1, XM_011524822.1, XM_011524821.1 (NP_000241.1), etc.; the numbers represent accession numbers of the NCBI database, and the nucleotide sequence and the amino acid sequence are indicated outside and inside the parentheses, respectively). As one example, the nucleotide sequence of the human MPO gene registered in the database as NM_000250.1 is shown in SEQ ID NO: 73, and the amino acid sequence of the human MPO protein encoded by this human MPO gene is shown in SEQ ID NO: 74. In the present specification, MPO is not limited to a protein consisting of the amino acid sequence of SEQ ID NO: 74 encoded by the nucleotide sequence of SEQ ID NO: 73. As for MPO, sequence information has been registered with a plurality of accession numbers as mentioned above, and a plurality of transcript variants are present. The nucleotide sequence of SEQ ID NO: 73 represents the nucleotide sequence of one of these transcript variants.

[0110] MTL5, a metallothionein-like protein, has been shown to be expressed specifically in the mouse testis and ovary. Metallothionein may play a central role in the regulation of cell growth and differentiation and be involved in spermatogenesis. MTL5 is present in various animals including humans, and its sequence information is also publicly known (e.g., human: NM_004923.3, NM_001039656.1, XM_011545404.1, XM_011545403.1, XM_011545402.1 (NP_001034745.1, NP_004914.2, XP_011543706.1, XP_011543705.1, XP_011543704.1), etc.; the numbers represent accession numbers of the NCBI database, and the nucleotide sequence and the amino acid sequence are indicated outside and inside the parentheses, respectively). As one example, the nucleotide sequence of the human MTL5 gene registered in the database as NM_004923.3 is shown in SEQ ID NO: 75, and the amino acid sequence of the human MTL5 protein encoded by this human MTL5 gene is shown in SEQ ID NO: 76. In the present specification, MTL5 is not limited to a protein consisting of the amino acid sequence of SEQ ID NO: 76 encoded by the nucleotide sequence of SEQ ID NO: 75. As for MTL5, sequence information has been registered with a plurality of accession numbers as mentioned above, and a plurality of transcript variants are present. The nucleotide sequence of SEQ ID NO: 75 represents the nucleotide sequence of one of these transcript variants.

[0111] MYBL2 is a nuclear protein that belongs to the MYB family of transcription factors and is involved in cell cycle progression. MYBL2 is phosphorylated by cyclin A/cyclin-dependent kinase 2 during the S-phase of the cell cycle and possesses both activator and repressor activities. MYBL2 is present in various animals including humans, and its sequence information is also publicly known (e.g., human: NM_001278610.1, NM_002466.3 (NP_001265539.1, NP_002457.1), etc.; the numbers represent accession numbers of the NCBI database, and the nucleotide sequence and the amino acid sequence are indicated outside and inside the parentheses, respectively). As one example, the nucleotide sequence of the human MYBL2 gene registered in the database as NM_002466.3 is shown in SEQ ID NO: 77, and the amino acid sequence of the human MYBL2 protein encoded by this human MYBL2 gene is shown in SEQ ID NO: 78. In the present specification, MYBL2 is not limited to a protein consisting of the amino acid sequence of SEQ ID NO: 78 encoded by the nucleotide sequence of SEQ ID NO: 77. As for MYBL2, sequence information has been registered with a plurality of accession numbers as mentioned above, and a plurality of transcript variants are present. The nucleotide sequence of SEQ ID NO: 77 represents the nucleotide sequence of one of these transcript variants.

[0112] MYO18A, myosin 18A, is known to be involved in 8p11 myeloproliferative syndrome. MYO18A has motor activity and ATPase activity. MYO18A is present in various animals including humans, and its sequence information is also publicly known (e.g., human: NM_203318.1, NM_078471.3 (NP_976063.1, NP_510880.2), etc.; the numbers represent accession numbers of the NCBI database, and the nucleotide sequence and the amino acid sequence are indicated outside and inside the parentheses, respectively). As one example, the nucleotide sequence of the human MYO18A gene registered in the database as NM_078471.3 is shown in SEQ ID NO: 79, and the amino acid sequence of the human MYO18A protein encoded by this human MYO18A gene is shown in SEQ ID NO: 80. In the present specification, MYO18A is not limited to a protein consisting of the amino acid sequence of SEQ ID NO: 80 encoded by the nucleotide sequence of SEQ ID NO: 79. As for MYO18A, sequence information has been registered with a plurality of accession numbers as mentioned above, and a plurality of transcript variants are present. The nucleotide sequence of SEQ ID NO: 79 represents the nucleotide sequence of one of these transcript variants.

[0113] On the other hand, the PI3K signaling pathway-related protein is a protein, except for Akt1, included in proteins involved in the PI3K/AKT signaling pathway. In other words, the PI3K signaling pathway-related protein is a PI3K/AKT signaling pathway-related protein except for Akt1. The PI3K/AKT signaling pathway is disclosed in, for example, Cell 2007 Jun. 29; 129 (7): 1261-74.

[0114] Specifically, examples of the PI3K signaling pathway-related protein that exhibits synthetic lethality when inhibited together with GST-π can include at least one PI3K signaling pathway-related protein selected from the group consisting of MTOR, IRAK1, IRS1, MYD88, NFKB1, PIK3CG, RAC1, AKT3, EIF4B, EIF4E, ILK, MTCP1, PIK3CA, and SRF. Of these 14 types of PI3K signaling pathway-related proteins, one type of PI3K signaling pathway-related protein may be inhibited together with GST-π, or two or more types of PI3K signaling pathway-related proteins may be inhibited together with GST-π.

[0115] Particularly, it is preferable for the PI3K signaling pathway-related protein that at least one PI3K signaling pathway-related protein selected from the group consisting of MTOR, IRAK1, IRS1, MYD88, NFKB1, PIK3CG, and RAC1 should be inhibited together with GST-π. These 7 types of PI3K signaling pathway-related proteins exhibit a remarkably high cell growth-inhibiting effect when each inhibited together with GST-π compared with when inhibited each alone or when GST-π is inhibited alone. Thus, it is preferable that the PI3K signaling pathway-related protein that exhibits synthetic lethality when inhibited together with GST-π should be selected from these 7 types of PI3K signaling pathway-related proteins.

[0116] MTOR, mechanistic target of rapamycin, is a target protein of rapamycin and is known as a serine-threonine kinase. MTOR belongs to the phosphatidylinositol kinase-related kinase family and is known to mediate the response of cells to stresses such as DNA damage and nutrient deprivation. MTOR is also known to act as a target of cell cycle arrest and the immunosuppressive effect of FKBP12-rapamycin complexes. MTOR is present in various animals including humans, and its sequence information is also publicly known (e.g., human: NM_004958.3, XM_005263438.1, XM_011541166.1 (NP_004949.1, XP_005263495.1, XP_005263495.1), etc.; the numbers represent accession numbers of the NCBI database, and the nucleotide sequence and the amino acid sequence are indicated outside and inside the parentheses, respectively). As one example, the nucleotide sequence of the human MTOR gene registered in the database as NM_004958.3 is shown in SEQ ID NO: 81, and the amino acid sequence of the human MTOR protein encoded by this human MTOR gene is shown in SEQ ID NO: 82. In the present specification, MTOR is not limited to a protein consisting of the amino acid sequence of SEQ ID NO: 82 encoded by the nucleotide sequence of SEQ ID NO: 81. As for MTOR, sequence information has been registered with a plurality of accession numbers as mentioned above, and a plurality of transcript variants are present. The nucleotide sequence of SEQ ID NO: 81 represents the nucleotide sequence of one of these transcript variants.

[0117] IRAK1, interleukin 1 receptor associated kinase 1, is a serine-threonine kinase that acts on interleukin 1 receptors by stimulation. IRAK1 is partly responsible for IL1-induced upregulation associated with a transcription factor NFκB. IRAK1 is present in various animals including humans, and its sequence information is also publicly known (e.g., human: NM_001025243.1, NM_001025242.1, NM_001569.3, XM_011531158.1, XM_005274668.2 (NP_001020414.1, NP_001020413.1, NP_001560.2, XP_011529460.1, XP_005274725.1), etc.; the numbers represent accession numbers of the NCBI database, and the nucleotide sequence and the amino acid sequence are indicated outside and inside the parentheses, respectively). As one example, the nucleotide sequence of the human IRAK1 gene registered in the database as NM_001025243.1 is shown in SEQ ID NO: 83, and the amino acid sequence of the human IRAK1 protein encoded by this human IRAK1 gene is shown in SEQ ID NO: 84. In the present specification, IRAK1 is not limited to a protein consisting of the amino acid sequence of SEQ ID NO: 84 encoded by the nucleotide sequence of SEQ ID NO: 83. As for IRAK1, sequence information has been registered with a plurality of accession numbers as mentioned above, and a plurality of transcript variants are present. The nucleotide sequence of SEQ ID NO: 83 represents the nucleotide sequence of one of these transcript variants.

[0118] IRS1, insulin receptor substrate 1, is known as a protein that is phosphorylated by insulin receptor tyrosine kinase. IRS1 is present in various animals including humans, and its sequence information is also publicly known (e.g., human: NM_005544.2 (NP_005535.1), etc.; the numbers represent accession numbers of the NCBI database, and the nucleotide sequence and the amino acid sequence are indicated outside and inside the parentheses, respectively). As one example, the nucleotide sequence of the human IRS1 gene registered in the database as NM_005544.2 is shown in SEQ ID NO: 85, and the amino acid sequence of the human IRS1 protein encoded by this human IRS1 gene is shown in SEQ ID NO: 86. In the present specification, IRS1 is not limited to a protein consisting of the amino acid sequence of SEQ ID NO: 86 encoded by the nucleotide sequence of SEQ ID NO: 85. As for IRS1, there is the possibility that a plurality of transcript variants are present. The nucleotide sequence of SEQ ID NO: 85 represents the nucleotide sequence of one of these transcript variants.

[0119] MYD88, myeloid differentiation primary response 88, is a cytoplasmic adaptor protein that plays a key role in innate and adaptive immune responses. MYD88 functions as an essential signal transducer in the interleukin 1 and Toll-like receptor signaling pathways. These signaling pathways regulate the activation of many inflammatory genes. MYD88 has an N-terminal death domain and a C-terminal Toll-interleukin 1 receptor domain. MYD88 is present in various animals including humans, and its sequence information is also publicly known (e.g., human: NM_001172567.1, NM_002468.4, NM_001172569.1, NM_001172568.1, NM_001172566.1, XM_005265172.1, XM_006713170.1 (NP_001166038.1, NP_002459.2, NP_001166040.1, NP_001166039.1, NP_001166037.1, XP_005265229.1, XP_006713233.1), etc.; the numbers represent accession numbers of the NCBI database, and the nucleotide sequence and the amino acid sequence are indicated outside and inside the parentheses, respectively). As one example, the nucleotide sequence of the human MYD88 gene registered in the database as NM_001172567.1 is shown in SEQ ID NO: 87, and the amino acid sequence of the human MYD88 protein encoded by this human MYD88 gene is shown in SEQ ID NO: 88. In the present specification, MYD88 is not limited to a protein consisting of the amino acid sequence of SEQ ID NO: 88 encoded by the nucleotide sequence of SEQ ID NO: 87. As for MYD88, sequence information has been registered with a plurality of accession numbers as mentioned above, and a plurality of transcript variants are present. The nucleotide sequence of SEQ ID NO: 87 represents the nucleotide sequence of one of these transcript variants.

[0120] NFKB1, nuclear factor of kappa light polypeptide gene enhancer in B-cells 1, is a 105 kD protein that is processed into a 50 kD protein during translation by 26S proteasome. The 105 kD protein is a Rel protein-specific transcription inhibitor, and the 50 kD protein is a DNA-binding subunit in a NFκ-B protein (NFKB) complex. NFKB1 is present in various animals including humans, and its sequence information is also publicly known (e.g., human: NM_003998.3, NM_001165412.1, XM_011532006.1, XM_011532007.1, XM_011532008.1, XM_011532009.1 (NP_003989.2, NP_001158884.1, XP_011530308.1, XP_011530309.1, XP_011530310.1, XP_011530311.1), etc.; the numbers represent accession numbers of the NCBI database, and the nucleotide sequence and the amino acid sequence are indicated outside and inside the parentheses, respectively). As one example, the nucleotide sequence of the human NFKB1 gene registered in the database as NM_003998.3 is shown in SEQ ID NO: 89, and the amino acid sequence of the human NFKB1 protein encoded by this human NFKB1 gene is shown in SEQ ID NO: 90. In the present specification, NFKB1 is not limited to a protein consisting of the amino acid sequence of SEQ ID NO: 90 encoded by the nucleotide sequence of SEQ ID NO: 89. As for NFKB1, sequence information has been registered with a plurality of accession numbers as mentioned above, and a plurality of transcript variants are present. The nucleotide sequence of SEQ ID NO: 89 represents the nucleotide sequence of one of these transcript variants.

[0121] PIK3CG, phosphatidylinositol-4,5-bisphosphate 3-kinase, catalytic subunit gamma, is known to form PI3K by binding to a p85 regulatory subunit, as with other class 1 catalytic subunits (p110-α, p110-β, and p110-δ). PIK3CG is present in various animals including humans, and its sequence information is also publicly known (e.g., human: NM_001282426.1, NM_001282427.1, NM_002649.3, XM_011516316.1, XM_011516317.1, XM_005250443.2 (NP_001269355.1, NP_001269356.1, NP_002640.2, XP_011514618.1, XP_011514619.1, XP_005250500.1), etc.; the numbers represent accession numbers of the NCBI database, and the nucleotide sequence and the amino acid sequence are indicated outside and inside the parentheses, respectively). As one example, the nucleotide sequence of the human PIK3CG gene registered in the database as NM_001282426.1 is shown in SEQ ID NO: 91, and the amino acid sequence of the human PIK3CG protein encoded by this human PIK3CG gene is shown in SEQ ID NO: 92. In the present specification, PIK3CG is not limited to a protein consisting of the amino acid sequence of SEQ ID NO: 92 encoded by the nucleotide sequence of SEQ ID NO: 91. As for PIK3CG, sequence information has been registered with a plurality of accession numbers as mentioned above, and a plurality of transcript variants are present. The nucleotide sequence of SEQ ID NO: 91 represents the nucleotide sequence of one of these transcript variants.

[0122] RAC1, ras-related C3 botulinum toxin substrate 1 (rho family, small GTP binding protein Rac1), is known as GTPase belonging to the RAS superfamily as a small GTP-binding protein. Factors belonging to this superfamily regulate various intracellular events including growth, cytoskeletal reorganization, and protein kinase activation. RAC1 is present in various animals including humans, and its sequence information is also publicly known (e.g., human: NM_018890.3, NM_006908.4 (NP_061485.1, NP_008839.2), etc.; the numbers represent accession numbers of the NCBI database, and the nucleotide sequence and the amino acid sequence are indicated outside and inside the parentheses, respectively). As one example, the nucleotide sequence of the human RAC1 gene registered in the database as NM_018890.3 is shown in SEQ ID NO: 93, and the amino acid sequence of the human RAC1 protein encoded by this human RAC1 gene is shown in SEQ ID NO: 94. In the present specification, RAC1 is not limited to a protein consisting of the amino acid sequence of SEQ ID NO: 94 encoded by the nucleotide sequence of SEQ ID NO: 93. As for RAC1, sequence information has been registered with a plurality of accession numbers as mentioned above, and a plurality of transcript variants are present. The nucleotide sequence of SEQ ID NO: 93 represents the nucleotide sequence of one of these transcript variants.

[0123] AKT3, v-akt murine thymoma viral oncogene homolog 3, is also called PKB and known as a member of the serine-threonine protein kinase family AKT. AKT kinases are known as regulatory factors in the cell signaling system that responds to insulin and growth factors. These kinases are involved in various biological processes including glycogen synthesis and glucose uptake as long as cell growth, differentiation, apoptosis, and tumorigenesis. This kinase has been found to be stimulated by platelet-derived growth factor (PDGF), insulin, and insulin-like growth factor 1 (IGF1). AKT3 is present in various animals including humans, and its sequence information is also publicly known (e.g., human: NM_181690.2, NM_001206729.1, NM_005465.4, XM_005272995.2, XM_011544011.1, XM_005272994.3, XM_005272997.3, XM_011544014.1, XM_011544012.1, XM_011544013.1, XM_006711726.2 (NP_859029.1, NP_001193658.1, NP_005456.1, XP_005273052.1, XP_011542313.1, XP_005273051.1, XP_005273054.1, XP_011542316.1, XP_011542314.1, XP_011542315.1, XP_006711789.1), etc.; the numbers represent accession numbers of the NCBI database, and the nucleotide sequence and the amino acid sequence are indicated outside and inside the parentheses, respectively). As one example, the nucleotide sequence of the human AKT3 gene registered in the database as NM_181690.2 is shown in SEQ ID NO: 95, and the amino acid sequence of the human AKT3 protein encoded by this human AKT3 gene is shown in SEQ ID NO: 96. In the present specification, AKT3 is not limited to a protein consisting of the amino acid sequence of SEQ ID NO: 96 encoded by the nucleotide sequence of SEQ ID NO: 95. As for AKT3, sequence information has been registered with a plurality of accession numbers as mentioned above, and a plurality of transcript variants are present. The nucleotide sequence of SEQ ID NO: 95 represents the nucleotide sequence of one of these transcript variants.

[0124] EIF4B, eukaryotic translation initiation factor 4B, is known as a protein that is involved in the PI3K-Akt signaling pathway and signals by GPCR. EIF4B is necessary for the binding of mRNA to ribosome and has functions closely related to EIF4-F and EIF4-A. EIF4B is known to bind to or near the 5′-terminal cap of mRNA in the presence of EIF4-F and ATP to stimulate ATPase activity and to stimulate the ATP-dependent RNA unwinding activity of EIF4-A and EIF4-F. EIF4B is present in various animals including humans, and its sequence information is also publicly known (e.g., human: NM_001300821.1, NM_001417.5, XM_006719274.1 (NP_001287750.1, NP_001408.2, XP_006719337.1), etc.; the numbers represent accession numbers of the NCBI database, and the nucleotide sequence and the amino acid sequence are indicated outside and inside the parentheses, respectively). As one example, the nucleotide sequence of the human EIF4B gene registered in the database as NM_001300821.1 is shown in SEQ ID NO: 97, and the amino acid sequence of the human EIF4B protein encoded by this human EIF4B gene is shown in SEQ ID NO: 98. In the present specification, EIF4B is not limited to a protein consisting of the amino acid sequence of SEQ ID NO: 98 encoded by the nucleotide sequence of SEQ ID NO: 97. As for EIF4B, sequence information has been registered with a plurality of accession numbers as mentioned above, and a plurality of transcript variants are present. The nucleotide sequence of SEQ ID NO: 97 represents the nucleotide sequence of one of these transcript variants.

[0125] EIF4E, eukaryotic translation initiation factor 4E, is known as a protein that constitutes a eukaryotic translation initiation factor 4F complex, which recognizes the 5′-terminal 7-methylguanosine cap structure of mRNA. EIF4E aids in translation initiation by recruiting ribosomes to the 5′-terminal cap structure. The binding of EIF4E to the 4F complex becomes a rate-limiting stage in translation initiation. EIF4E is present in various animals including humans, and its sequence information is also publicly known (e.g., human: NM_001968.3, NM_001130679.1, NM_001130678.1, XM_006714126.2, XM_006714127.2 (NP_001959.1, NP_001124151.1, NP_001124150.1, XP_006714189.1, XP_006714190.1), etc.; the numbers represent accession numbers of the NCBI database, and the nucleotide sequence and the amino acid sequence are indicated outside and inside the parentheses, respectively). As one example, the nucleotide sequence of the human EIF4E gene registered in the database as NM_001968.3 is shown in SEQ ID NO: 99, and the amino acid sequence of the human EIF4E protein encoded by this human EIF4E gene is shown in SEQ ID NO: 100. In the present specification, EIF4E is not limited to a protein consisting of the amino acid sequence of SEQ ID NO: 100 encoded by the nucleotide sequence of SEQ ID NO: 99. As for EIF4E, sequence information has been registered with a plurality of accession numbers as mentioned above, and a plurality of transcript variants are present. The nucleotide sequence of SEQ ID NO: 99 represents the nucleotide sequence of one of these transcript variants.

[0126] ILK, integrin linked kinase, is a protein having a kinase-like domain and four ankyrin-like repeats and is known to control integrin-mediated signal transduction by binding to the cytoplasmic domain of β integrin in the cell membrane. ILK is present in various animals including humans, and its sequence information is also publicly known (e.g., human: NM_004517.3, NM_001278441.1, NM_001014794.2, NM_001278442.1, NM_001014795.2, XM_005252904.3, XM_005252905.1, XM_011520065.1 (NP_004508.1, NP_001265370.1, NP_001014794.1, NP_001265371.1, NP_001014795.1, XP_005252961.1, XP_005252962.1, XP_011518367.1), etc.; the numbers represent accession numbers of the NCBI database, and the nucleotide sequence and the amino acid sequence are indicated outside and inside the parentheses, respectively). As one example, the nucleotide sequence of the human ILK gene registered in the database as NM_004517.3 is shown in SEQ ID NO: 101, and the amino acid sequence of the human ILK protein encoded by this human ILK gene is shown in SEQ ID NO: 102. In the present specification, ILK is not limited to a protein consisting of the amino acid sequence of SEQ ID NO: 102 encoded by the nucleotide sequence of SEQ ID NO: 101. As for ILK, sequence information has been registered with a plurality of accession numbers as mentioned above, and a plurality of transcript variants are present. The nucleotide sequence of SEQ ID NO: 101 represents the nucleotide sequence of one of these transcript variants.

[0127] MTCP1, mature T-cell proliferation 1, was identified, as is known, by involvement in some t(X; 14) translocations associated with the growth of mature T cells. This region has a complicated structure with a common promoter and 5′ exons spliced to two different sets of 3′ exons that encode two different proteins. The upstream 13 kD protein is considered to belong to the TCL1 family and participate in leukemia induction. MTCP1 is present in various animals including humans, and its sequence information is also publicly known (e.g., human: NM_001018025.3 (NP_001018025.1), etc.; the numbers represent accession numbers of the NCBI database, and the nucleotide sequence and the amino acid sequence are indicated outside and inside the parentheses, respectively). As one example, the nucleotide sequence of the human MTCP1 gene registered in the database as NM_001018025.3 is shown in SEQ ID NO: 103, and the amino acid sequence of the human MTCP1 protein encoded by this human MTCP1 gene is shown in SEQ ID NO: 104. In the present specification, MTCP1 is not limited to a protein consisting of the amino acid sequence of SEQ ID NO: 104 encoded by the nucleotide sequence of SEQ ID NO: 103. As for MTCP1, there is the possibility that a plurality of transcript variants are present. The nucleotide sequence of SEQ ID NO: 103 represents the nucleotide sequence of one of these transcript variants.

[0128] PIK3CA, phosphatidylinositol-4,5-bisphosphate 3-kinase, catalytic subunit alpha, is a 110 kD catalytic subunit in phosphatidylinositol 3-kinase and phosphorylates PtdIns, PtdIns4P, and PtdIns(4,5)P2 by use of ATP. PIK3CA is present in various animals including humans, and its sequence information is also publicly known (e.g., human: NM_006218.2, XM_006713658.2, XM_011512894.1 (NP_006209.2, XP_006713721.1, XP_011511196.1), etc.; the numbers represent accession numbers of the NCBI database, and the nucleotide sequence and the amino acid sequence are indicated outside and inside the parentheses, respectively). As one example, the nucleotide sequence of the human PIK3CA gene registered in the database as NM_006218.2 is shown in SEQ ID NO: 105, and the amino acid sequence of the human PIK3CA protein encoded by this human PIK3CA gene is shown in SEQ ID NO: 106. In the present specification, PIK3CA is not limited to a protein consisting of the amino acid sequence of SEQ ID NO: 106 encoded by the nucleotide sequence of SEQ ID NO: 105. As for PIK3CA, sequence information has been registered with a plurality of accession numbers as mentioned above, and a plurality of transcript variants are present. The nucleotide sequence of SEQ ID NO: 105 represents the nucleotide sequence of one of these transcript variants.

[0129] SRF, serum response factor, is known as a ubiquitous nuclear protein that stimulates cell growth and differentiation. SRF belongs to the transcription factor MADS (MCM1, Agamous, Deficiens, and SRF) box superfamily. SRF binds to a serum response element (SRE) in the promoter region of a target gene. SRF regulates the activation of many immediate early genes such as c-fos and thereby participates in cell cycle regulation, apoptosis, cell growth, and cell differentiation. SRF is present in various animals including humans, and its sequence information is also publicly known (e.g., human: NM_003131.3, NM_001292001.1 (NP_003122.1, NP_001278930.1), etc.; the numbers represent accession numbers of the NCBI database, and the nucleotide sequence and the amino acid sequence are indicated outside and inside the parentheses, respectively). As one example, the nucleotide sequence of the human SRF gene registered in the database as NM_003131.3 is shown in SEQ ID NO: 107, and the amino acid sequence of the human SRF protein encoded by this human SRF gene is shown in SEQ ID NO: 108. In the present specification, SRF is not limited to a protein consisting of the amino acid sequence of SEQ ID NO: 108 encoded by the nucleotide sequence of SEQ ID NO: 107. As for SRF, sequence information has been registered with a plurality of accession numbers as mentioned above, and a plurality of transcript variants are present. The nucleotide sequence of SEQ ID NO: 107 represents the nucleotide sequence of one of these transcript variants.

[0130] Although GST-π, ATM, CDC25A, p21, PRKDC, RBBP8, SKP2, MCM10, RNPC1, CCNL1, CENPH, BRSK1, MYLK, MCM8, CCNB3, MCMDC1, AATF, AKT1, ALOX12, ANXA1, ANXA4, API5, ATF5, AVEN, AZU1, BAG1, BCL2L1, BFAR, CFLAR, IL2, MALT1, MCL1, MKL1, MPO, MTL5, MYBL2, MYO18A, MTOR, IRAK1, IRS1, MYD88, NFKB1, PIK3CG, RAC1, AKT3, EIF4B, EIF4E, ILK, MTCP1, PIK3CA and SRF can be identified by specific nucleotide sequences and amino acid sequences as mentioned above, the possibility must be taken into consideration that mutations occur in the nucleotide sequences or the amino acid sequences among organism individuals.

[0131] Specifically, GST-π, ATM, CDC25A, p21, PRKDC, RBBP8, SKP2, MCM10, RNPC1, CCNL1, CENPH, BRSK1, MYLK, MCM8, CCNB3, MCMDC1, AATF, AKT1, ALOX12, ANXA1, ANXA4, API5, ATF5, AVEN, AZU1, BAG1, BCL2L1, BFAR, CFLAR, IL2, MALT1, MCL1, MKL1, MPO, MTL5, MYBL2, MYO18A, MTOR, IRAK1, IRS1, MYD88, NFKB1, PIK3CG, RAC1, AKT3, EIF4B, EIF4E, ILK, MTCP1, PIK3CA and SRF are not limited to proteins having the same sequences as the amino acid sequences registered in the database and include proteins that have sequences differing from these sequences by 1 or 2 or more, typically, 1 or several, for example, 1, 2, 3, 4, 5, 6, 7, 8, 9, or 10 amino acids and have functions equivalent to GST-π, ATM, CDC25A, p21, PRKDC, RBBP8, SKP2, MCM10, RNPC1, CCNL1, CENPH, BRSK1, MYLK, MCM8, CCNB3, MCMDC1, AATF, AKT1, ALOX12, ANXA1, ANXA4, API5, ATF5, AVEN, AZU1, BAG1, BCL2L1, BFAR, CFLAR, IL2, MALT1, MCL1, MKL1, MPO, MTL5, MYBL2, MYO18A, MTOR, IRAK1, IRS1, MYD88, NFKB1, PIK3CG, RAC1, AKT3, EIF4B, EIF4E, ILK, MTCP1, PIK3CA and SRF.

[0132] Moreover, GST-π, ATM, CDC25A, p21, PRKDC, RBBP8, SKP2, MCM10, RNPC1, CCNL1, CENPH, BRSK1, MYLK, MCM8, CCNB3, MCMDC1, AATF, AKT1, ALOX12, ANXA1, ANXA4, API5, ATF5, AVEN, AZU1, BAG1, BCL2L1, BFAR, CFLAR, IL2, MALT1, MCL1, MKL1, MPO, MTL5, MYBL2, MYO18A, MTOR, IRAK1, IRS1, MYD88, NFKB1, PIK3CG, RAC1, AKT3, EIF4B, EIF4E, ILK, MTCP1, PIK3CA and SRF include ones that consist of nucleotide sequences having 70% or higher, 80% or higher, 90% or higher, 95% or higher, or 97% or higher identity to the specific nucleotide sequences mentioned above and encode proteins having functions equivalent to GST-π, ATM, CDC25A, p21, PRKDC, RBBP8, SKP2, MCM10, RNPC1, CCNL1, CENPH, BRSK1, MYLK, MCM8, CCNB3, MCMDC1, AATF, AKT1, ALOX12, ANXA1, ANXA4, API5, ATF5, AVEN, AZU1, BAG1, BCL2L1, BFAR, CFLAR, IL2, MALT1, MCL1, MKL1, MPO, MTL5, MYBL2, MYO18A, MTOR, IRAK1, IRS1, MYD88, NFKB1, PIK3CG, RAC1, AKT3, EIF4B, EIF4E, ILK, MTCP1, PIK3CA and SRF.

[0133] The specific functions of GST-π, ATM, CDC25A, p21, PRKDC, RBBP8, SKP2, MCM10, RNPC1, CCNL1, CENPH, BRSK1, MYLK, MCM8, CCNB3, MCMDC1, AATF, AKT1, ALOX12, ANXA1, ANXA4, API5, ATF5, AVEN, AZU1, BAG1, BCL2L1, B FAR, CFLAR, IL2, MALT1, MCL1, MKL1, MPO, MTL5, MYBL2, MYO18A, MTOR, IRAK1, IRS1, MYD88, NFKB1, PIK3CG, RAC1, AKT3, EIF4B, EIF4E, ILK, MTCP1, PIK3CA and SRF are as mentioned above.

[0134] In the present specification, the phrases such as “as used herein”, “used herein”, “in the present specification”, and “described herein” mean that the description subsequent thereto is applied to all aspects of the invention described in the present specification, unless otherwise specified. Also, all technical terms and scientific terms used herein have the same meanings as those commonly understood by those skilled in the art unless otherwise defined. All patents, bulletins, and other publications cited herein are incorporated herein by reference in their entirety.

[0135] The “drug inhibiting GST-π” used herein is not limited and includes, for example, drugs inhibiting the production and/or activity of GST-π and drugs promoting the degradation and/or deactivation of GST-π. Examples of the drug inhibiting the production of GST-π include, but are not limited to, RNAi molecules against DNA encoding GST-π, ribozymes, antisense nucleic acids, DNA/RNA chimeric polynucleotides, and vectors for expressing them.

[0136] Alternatively, any compound that acts on GST-π can be used as the drug inhibiting GST-π. An organic compound (an amino acid, a polypeptide or a derivative thereof, a low-molecular-weight compound, a sugar, a high-molecular-weight compound, etc.), an inorganic compound, or the like can be used as such a compound. Also, such a compound may be any of natural and nonnatural substances. Examples of the derivative of the polypeptide include modified polypeptides obtained by adding modifying groups, and variant polypeptides obtained by altering amino acid residues. In addition, such a compound may be a single compound or may be a compound library, an expression product of a gene library, a cell extract, a cell culture supernatant, a product by a fermentation microorganism, a marine organism extract, a plant extract, or the like. That is, the “drug inhibiting GST-π” is not limited to nucleic acids such as RNAi molecules and includes any compound.

[0137] Specifically, examples of the drug inhibiting the activity of GST-π include, but are not limited to, substances binding to GST-π, for example, glutathione, glutathione analogs (e.g., those described in WO 95/08563, WO 96/40205, WO 99/54346, Non Patent Literature 4, etc.), ketoprofen (Non Patent Literature 2), indomethacin (Hall et al., Cancer Res. 1989; 49 (22): 6265-8), ethacrynic acid, piriprost (Tew et al., Cancer Res. 1988; 48 (13): 3622-5), anti-GST-π antibodies, and dominant negative mutants of GST-π. These drugs are commercially available or can be appropriately produced on the basis of publicly known techniques.

[0138] RNAi molecules against DNA encoding GST-π, ribozymes, antisense nucleic acids, DNA/RNA chimeric polynucleotides, and vectors for expressing them are preferable as the drug inhibiting the production or activity of GST-π because of high specificity and a low possibility of adverse reactions.

[0139] The inhibition of GST-π can be determined when the expression or activity of GST-π in the cell is inhibited as compared with the case the GST-π-inhibiting agent is not allowed to act thereon. The expression of GST-π can be evaluated without limitations by a known arbitrary approach, for example, an immunoprecipitation method using an anti-GST-π antibody, EIA, ELISA, IRA, IRMA, Western blotting, an immunohistochemical method, an immunocytochemical method, flow cytometry, or various hybridization methods, Northern blotting, Southern blotting, or various PCR methods which employ nucleic acids specifically hybridizing to a nucleic acid encoding GST-π or a unique fragment thereof, or a transcript (e.g., mRNA) or a splicing product of the nucleic acid.

[0140] Also, the activity of GST-π can be evaluated without limitations by analyzing the known activity of GST-π, for example, binding activity against a protein such as Raf-1 (particularly, phosphorylated Raf-1) or EGFR (particularly, phosphorylated EGFR) by a known arbitrary method, for example, an immunoprecipitation method, Western blotting, mass spectrometry, a pull-down method, or a surface plasmon resonance (SPR) method.

[0141] The “drug inhibiting a homeostasis-related protein that exhibits synthetic lethality when inhibited together with GST-π” used herein is not limited and includes, for example, drugs inhibiting the production and/or activity of the protein and drugs promoting the degradation and/or deactivation of the protein. Examples of the drug inhibiting the production of the protein include, but are not limited to, RNAi molecules against DNA encoding the homeostasis-related protein, ribozymes, antisense nucleic acids, DNA/RNA chimeric polynucleotides, and vectors for expressing them. Alternatively, any compound that acts on the protein can be used as the drug inhibiting the activity of the homeostasis-related protein or the drug promoting the degradation and/or deactivation of the homeostasis-related protein. An organic compound (an amino acid, a polypeptide or a derivative thereof, a low-molecular-weight compound, a sugar, a high-molecular-weight compound, etc.), an inorganic compound, or the like can be used as such a compound. Also, such a compound may be any of natural and nonnatural substances. Examples of the derivative of the polypeptide include modified polypeptides obtained by adding modifying groups, and variant polypeptides obtained by altering amino acid residues. In addition, such a compound may be a single compound or may be a compound library, an expression product of a gene library, a cell extract, a cell culture supernatant, a product by a fermentation microorganism, a marine organism extract, a plant extract, or the like. That is, the “drug inhibiting a homeostasis-related protein that exhibits synthetic lethality when inhibited together with GST-π” is not limited to nucleic acids such as RNAi molecules and includes any compound.

[0142] More specifically, examples of the drug inhibiting the activity of p21 among the cell cycle-regulating proteins that exhibit synthetic lethality when inhibited together with GST-π include, but are not limited to: butyrolactone I (Sax et al., Cell Cycle, January; 1 (1): 90-6, 2002), which is a low-molecular-weight compound promoting the proteasomal degradation of the p21 protein while also inhibiting the enzymatic activity of CDC2, CDK2, and CDK5; quetiapine (Kondo et al., Transl. Psychiatry, April 2; 3: e243, 2013), which is a psychotropic drug reportedly specifically inhibiting the expression of p21 in the nerve cells or oligodendrocytes of CD-1 mice; Sorafenib (Inoue et al., Cancer Biology & Therapy, 12: 9, 827-836, 2011), which is a low-molecular-weight compound specifically inhibiting p21 without the involvement of p53, p27, or Akt and inhibiting multikinase for Raf, VEGFR, PDGFR, and the like; UC2288 (Wettersten et al., Cancer Biology & Therapy, 14 (3), 278-285, 2013), which is a low-molecular-weight compound specifically inhibiting p21 without the involvement of p53 or Akt; and RNAi molecules against DNA encoding p21, ribozymes, antisense nucleic acids, DNA/RNA chimeric polynucleotides, and vectors for expressing them, anti-p21 antibodies, and dominant negative variants of p21. These drugs are commercially available or can be appropriately produced on the basis of publicly known techniques.

[0143] Examples of the drug inhibiting the activity of RNPC1 among the cell cycle-regulating proteins that exhibit synthetic lethality when inhibited together with GST-π include, but are not limited to, RNAi molecules against DNA encoding RNPC1, ribozymes, antisense nucleic acids, DNA/RNA chimeric polynucleotides, and vectors for expressing them, anti-RNPC1 antibodies, and dominant negative variants of RNPC1. These drugs are commercially available or can be appropriately produced on the basis of publicly known techniques.

[0144] Examples of the drug inhibiting the activity of CCNL1 among the cell cycle-regulating proteins that exhibit synthetic lethality when inhibited together with GST-π include, but are not limited to, RNAi molecules against DNA encoding CCNL1, ribozymes, antisense nucleic acids, DNA/RNA chimeric polynucleotides, and vectors for expressing them, anti-CCNL1 antibodies, and dominant negative variants of CCNL1. These drugs are commercially available or can be appropriately produced on the basis of publicly known techniques.

[0145] Examples of the drug inhibiting the activity of MCM8 among the cell cycle-regulating proteins that exhibit synthetic lethality when inhibited together with GST-π include, but are not limited to, RNAi molecules against DNA encoding MCM8, ribozymes, antisense nucleic acids, DNA/RNA chimeric polynucleotides, and vectors for expressing them, anti-MCM8 antibodies, and dominant negative variants of MCM8. These drugs are commercially available or can be appropriately produced on the basis of publicly known techniques.

[0146] Examples of the drug inhibiting the activity of CCNB3 among the cell cycle-regulating proteins that exhibit synthetic lethality when inhibited together with GST-π include, but are not limited to, RNAi molecules against DNA encoding CCNB3, ribozymes, antisense nucleic acids, DNA/RNA chimeric polynucleotides, and vectors for expressing them, anti-CCNB3 antibodies, and dominant negative variants of CCNB3. These drugs are commercially available or can be appropriately produced on the basis of publicly known techniques.

[0147] Examples of the drug inhibiting the activity of MCMDC1 among the cell cycle-regulating proteins that exhibit synthetic lethality when inhibited together with GST-π include, but are not limited to, RNAi molecules against DNA encoding MCMDC1, ribozymes, antisense nucleic acids, DNA/RNA chimeric polynucleotides, and vectors for expressing them, anti-MCMDC1 antibodies, and dominant negative variants of MCMDC1. These drugs are commercially available or can be appropriately produced on the basis of publicly known techniques.

[0148] Examples of the drug inhibiting the activity of ATM among the cell cycle-regulating proteins that exhibit synthetic lethality when inhibited together with GST-π include, but are not limited to: CGK 733 (Won et al., Nat. Chem. Biol. 2, 369, 2006), which is a low-molecular-weight compound selectively inhibiting the kinase activity of ATM and ATR; KU-55933 (Lau et al., Nat. Cell Biol. 7, 493, 2005), KU-60019 (Zirkin et al., J Biol Chem. July 26; 288 (30): 21770-83, 2013), and CP-466722 (Rainey et al., Cancer Res. September 15; 68 (18):7466-74, 2008), which are low-molecular-weight compounds selectively inhibiting the kinase activity of ATM; and RNAi molecules against DNA encoding ATM, ribozymes, antisense nucleic acids, DNA/RNA chimeric polynucleotides, and vectors for expressing them, anti-ATM antibodies, and dominant negative variants of ATM. These drugs are commercially available or can be appropriately produced on the basis of publicly known techniques.

[0149] Examples of the drug inhibiting the activity of CDC25A among the cell cycle-regulating proteins that exhibit synthetic lethality when inhibited together with GST-π include, but are not limited to: NSC95397 (Lazo J S et al., Mol. Pharmacol. 61: 720-728, 2002), which is a low-molecular-weight compound inhibiting the phosphatase activity of each of human CDC25A, human CDC25B, and human CDC25C; SC alpha alpha delta 09 (Rice, R. L. et al., Biochemistry 36 (50): 15965-15974, 1997), which is a low-molecular-weight compound inhibiting the phosphatase activity of each of human CDC25A, human CDC25B, human CDC25C, and human tyrosine phosphatase PTB1B; and RNAi molecules against DNA encoding CDC25A, ribozymes, antisense nucleic acids, DNA/RNA chimeric polynucleotides, and vectors for expressing them, anti-CDC25A antibodies, and dominant negative variants of CDC25A. These drugs are commercially available or can be appropriately produced on the basis of publicly known techniques.

[0150] Examples of the drug inhibiting the activity of PRKDC among the cell cycle-regulating proteins that exhibit synthetic lethality when inhibited together with GST-π include, but are not limited to, RNAi molecules against DNA encoding PRKDC, ribozymes, antisense nucleic acids, DNA/RNA chimeric polynucleotides, and vectors for expressing them, anti-PRKDC antibodies, and dominant negative variants of PRKDC. These drugs are commercially available or can be appropriately produced on the basis of publicly known techniques.

[0151] Examples of the drug inhibiting the activity of RBBP8 among the cell cycle-regulating proteins that exhibit synthetic lethality when inhibited together with GST-π include, but are not limited to, RNAi molecules against DNA encoding RBBP8, ribozymes, antisense nucleic acids, DNA/RNA chimeric polynucleotides, and vectors for expressing them, anti-RBBP8 antibodies, and dominant negative variants of RBBP8. These drugs are commercially available or can be appropriately produced on the basis of publicly known techniques.

[0152] Examples of the drug inhibiting the activity of SKP2 among the cell cycle-regulating proteins that exhibit synthetic lethality when inhibited together with GST-π include, but are not limited to, RNAi molecules against DNA encoding SKP2, ribozymes, antisense nucleic acids, DNA/RNA chimeric polynucleotides, and vectors for expressing them, anti-SKP2 antibodies, and dominant negative variants of SKP2. These drugs are commercially available or can be appropriately produced on the basis of publicly known techniques.

[0153] Examples of the drug inhibiting the activity of MCM10 among the cell cycle-regulating proteins that exhibit synthetic lethality when inhibited together with GST-π include, but are not limited to, RNAi molecules against DNA encoding MCM10, ribozymes, antisense nucleic acids, DNA/RNA chimeric polynucleotides, and vectors for expressing them, anti-MCM10 antibodies, and dominant negative variants of MCM10. These drugs are commercially available or can be appropriately produced on the basis of publicly known techniques.

[0154] Examples of the drug inhibiting the activity of CENPH among the cell cycle-regulating proteins that exhibit synthetic lethality when inhibited together with GST-π include, but are not limited to, RNAi molecules against DNA encoding CENPH, ribozymes, antisense nucleic acids, DNA/RNA chimeric polynucleotides, and vectors for expressing them, anti-CENPH antibodies, and dominant negative variants of CENPH. These drugs are commercially available or can be appropriately produced on the basis of publicly known techniques.

[0155] Examples of the drug inhibiting the activity of BRSK1 among the cell cycle-regulating proteins that exhibit synthetic lethality when inhibited together with GST-π include, but are not limited to, RNAi molecules against DNA encoding BRSK1, ribozymes, antisense nucleic acids, DNA/RNA chimeric polynucleotides, and vectors for expressing them, anti-BRSK1 antibodies, and dominant negative variants of BRSK1. These drugs are commercially available or can be appropriately produced on the basis of publicly known techniques.

[0156] Examples of the drug inhibiting the activity of MYLK among the cell cycle-regulating proteins that exhibit synthetic lethality when inhibited together with GST-π include, but are not limited to, HA-100 Dihydrochloride (Gerard et al., J Clin Invest. January; 77 (1): 61-5. 1986), which is a low-molecular-weight compound inhibiting the activity of MYLK in addition to the inhibition of the activity of various protein kinases (PKA and PKC, etc.); Staurosporine (Tamaoki et al., Biochem. Biophys. Res. Commun. 135: 397-402. 1986), which is a low-molecular-weight compound inhibiting the activity of MYLK in addition to the inhibition of the activity of various protein kinases (PKA, PKC, PKG, CaMK, CaMKII, and phosphorylase kinase, etc.); Calphostin C (Kobayashi et al., Biochem. Biophys. Res. Commun. 159: 548-553. 1989), which is a low-molecular-weight compound serving as a selective inhibitor of PKC and also inhibiting the activity of MYLK; Piceatannol (Oliver et al., J. Biol. Chem. 269: 29697-29703. 1994), which is a low-molecular-weight compound serving as a tyrosine kinase inhibitor and also inhibiting the activity of MYLK; A-3 Hydrochloride (Inagaki et al., Mol. Pharmacol. 29, 577. 1986), which is a low-molecular-weight compound inhibiting the activity of MYLK in addition to the inhibition of the activity of various casein kinases and protein kinases; H-7 Dihydrochloride (Kawamoto et al., Biochem. Biophys. Res. Commun. 125: 258-264. 1984), which is a low-molecular-weight compound serving as a cell-permeable serine/threonine kinase inhibitor and also inhibiting the activity of MYLK; H-9 Hydrochloride (Wolf et al., J. Biol. Chem. 260: 15718-15722. 1985), which is a low-molecular-weight compound inhibiting the activity of MYLK in addition to the inhibition of the activity of various protein kinases (PKA and PKC, etc.); W-5 (Hidaka et al., Mol. Pharmacol. 20: 571-578. 1981), which is a low-molecular-weight compound serving as a calmodulin (CaM) antagonist and also inhibiting the activity of MYLK; W-7 (Hidaka et al., Proc. Natl. Acad. Sci. U.S.A. 78: 4354-4357. 1981), which is a low-molecular-weight compound serving as a calmodulin (CaM) antagonist and also inhibiting the activity of MYLK; W-13 Isomer Hydrochloride (Hidaka et al., Proc. Natl. Acad. Sci. U.S.A. 78: 4354-4357. 1981), which is a low-molecular-weight compound inhibiting the activity of MYLK in addition to the inhibition of the activity of various protein kinases (PKA and PKC, etc.); ML-7 Dihydrochloride (Saitoh et al., J. Biol. Chem. 262: 7796-7801. 1987), which is a low-molecular-weight compound inhibiting the activity of MYLK in addition to the inhibition of the activity of various protein kinases (PKA and PKC, etc.); ML-9 (Saitoh et al., Biochem. Biophys. Res. Commun. 140: 280-287. 1986), which is a low-molecular-weight compound selectively inhibiting MYLK and CaMK; Myricetin (Hagiwara et al., Biochem. Pharmacol. 37: 2987-2992. 1988), which is a low-molecular-weight compound inhibiting the activity of MYLK in addition to the inhibition of the activity of various casein kinases and protein kinases; E6 Berbamine (Hu et al., Biochem. Pharmacol. October 20; 44 (8): 1543-7. 1992), which is a low-molecular-weight compound serving as a cell-permeable calmodulin (CaM) antagonist and also inhibiting the activity of MYLK; K-252a (Kase et al., J. Antibiot. 39: 1059-1065. 1986), which is a low-molecular-weight compound inhibiting the activity of MYLK in addition to the inhibition of the activity of various protein kinases; K-252b (Nakanishi et al., J. Antibiot. 39: 1066-1071. 1986), which is a low-molecular-weight compound inhibiting the activity of MYLK in addition to the inhibition of the activity of various protein kinases; Altenusin (Rosett et al., Biochem. J. 67: 390-400. 1957), which is a low-molecular-weight compound serving as a c-Src inhibitor and also inhibiting the activity of MYLK; and RNAi molecules against DNA encoding MYLK, ribozymes, antisense nucleic acids, DNA/RNA chimeric polynucleotides, and vectors for expressing them, anti-MYLK antibodies, and dominant negative variants of MYLK. These drugs are commercially available or can be appropriately produced on the basis of publicly known techniques.

[0157] On the other hand, examples of the drug inhibiting the activity of AATF among the anti-apoptosis-related proteins that exhibit synthetic lethality when inhibited together with GST-π include, but are not limited to, RNAi molecules against DNA encoding AATF, ribozymes, antisense nucleic acids, DNA/RNA chimeric polynucleotides, and vectors for expressing them, anti-AATF antibodies, and dominant negative variants of AATF. These drugs are commercially available or can be appropriately produced on the basis of publicly known techniques.

[0158] Examples of the drug inhibiting the activity of ALOX12 among the anti-apoptosis-related proteins that exhibit synthetic lethality when inhibited together with GST-π include, but are not limited to, RNAi molecules against DNA encoding ALOX12, ribozymes, antisense nucleic acids, DNA/RNA chimeric polynucleotides, and vectors for expressing them, anti-ALOX12 antibodies, and dominant negative variants of ALOX12. These drugs are commercially available or can be appropriately produced on the basis of publicly known techniques.

[0159] Examples of the drug inhibiting the activity of ANXA1 among the anti-apoptosis-related proteins that exhibit synthetic lethality when inhibited together with GST-π include, but are not limited to, RNAi molecules against DNA encoding ANXA1, ribozymes, antisense nucleic acids, DNA/RNA chimeric polynucleotides, and vectors for expressing them, anti-ANXA1 antibodies, and dominant negative variants of ANXA1. These drugs are commercially available or can be appropriately produced on the basis of publicly known techniques.

[0160] Examples of the drug inhibiting the activity of ANXA4 among the anti-apoptosis-related proteins that exhibit synthetic lethality when inhibited together with GST-π include, but are not limited to, RNAi molecules against DNA encoding ANXA4, ribozymes, antisense nucleic acids, DNA/RNA chimeric polynucleotides, and vectors for expressing them, anti-ANXA4 antibodies, and dominant negative variants of ANXA4. These drugs are commercially available or can be appropriately produced on the basis of publicly known techniques.

[0161] Examples of the drug inhibiting the activity of API5 among the anti-apoptosis-related proteins that exhibit synthetic lethality when inhibited together with GST-π include, but are not limited to, RNAi molecules against DNA encoding API5, ribozymes, antisense nucleic acids, DNA/RNA chimeric polynucleotides, and vectors for expressing them, anti-API5 antibodies, and dominant negative variants of API5. These drugs are commercially available or can be appropriately produced on the basis of publicly known techniques.

[0162] Examples of the drug inhibiting the activity of ATF5 among the anti-apoptosis-related proteins that exhibit synthetic lethality when inhibited together with GST-π include, but are not limited to, RNAi molecules against DNA encoding ATF5, ribozymes, antisense nucleic acids, DNA/RNA chimeric polynucleotides, and vectors for expressing them, anti-ATF5 antibodies, and dominant negative variants of ATF5. These drugs are commercially available or can be appropriately produced on the basis of publicly known techniques.

[0163] Examples of the drug inhibiting the activity of AVEN among the anti-apoptosis-related proteins that exhibit synthetic lethality when inhibited together with GST-π include, but are not limited to, RNAi molecules against DNA encoding AVEN, ribozymes, antisense nucleic acids, DNA/RNA chimeric polynucleotides, and vectors for expressing them, anti-AVEN antibodies, and dominant negative variants of AVEN. These drugs are commercially available or can be appropriately produced on the basis of publicly known techniques.

[0164] Examples of the drug inhibiting the activity of AZU1 among the anti-apoptosis-related proteins that exhibit synthetic lethality when inhibited together with GST-π include, but are not limited to, RNAi molecules against DNA encoding AZU1, ribozymes, antisense nucleic acids, DNA/RNA chimeric polynucleotides, and vectors for expressing them, anti-AZU1 antibodies, and dominant negative variants of AZU1. These drugs are commercially available or can be appropriately produced on the basis of publicly known techniques.

[0165] Examples of the drug inhibiting the activity of BAG1 among the anti-apoptosis-related proteins that exhibit synthetic lethality when inhibited together with GST-π include, but are not limited to, RNAi molecules against DNA encoding BAG1, ribozymes, antisense nucleic acids, DNA/RNA chimeric polynucleotides, and vectors for expressing them, anti-BAG1 antibodies, and dominant negative variants of BAG1. These drugs are commercially available or can be appropriately produced on the basis of publicly known techniques.

[0166] Examples of the drug inhibiting the activity of BCL2L1 among the anti-apoptosis-related proteins that exhibit synthetic lethality when inhibited together with GST-π include, but are not limited to, RNAi molecules against DNA encoding BCL2L1, ribozymes, antisense nucleic acids, DNA/RNA chimeric polynucleotides, and vectors for expressing them, anti-BCL2L1 antibodies, and dominant negative variants of BCL2L1. These drugs are commercially available or can be appropriately produced on the basis of publicly known techniques.

[0167] Examples of the drug inhibiting the activity of BFAR among the anti-apoptosis-related proteins that exhibit synthetic lethality when inhibited together with GST-π include, but are not limited to, RNAi molecules against DNA encoding BFAR, ribozymes, antisense nucleic acids, DNA/RNA chimeric polynucleotides, and vectors for expressing them, anti-BFAR antibodies, and dominant negative variants of BFAR. These drugs are commercially available or can be appropriately produced on the basis of publicly known techniques.

[0168] Examples of the drug inhibiting the activity of CFLAR among the anti-apoptosis-related proteins that exhibit synthetic lethality when inhibited together with GST-π include, but are not limited to, RNAi molecules against DNA encoding CFLAR, ribozymes, antisense nucleic acids, DNA/RNA chimeric polynucleotides, and vectors for expressing them, anti-CFLAR antibodies, and dominant negative variants of CFLAR. These drugs are commercially available or can be appropriately produced on the basis of publicly known techniques.

[0169] Examples of the drug inhibiting the activity of IL2 among the anti-apoptosis-related proteins that exhibit synthetic lethality when inhibited together with GST-π include, but are not limited to, RNAi molecules against DNA encoding IL2, ribozymes, antisense nucleic acids, DNA/RNA chimeric polynucleotides, and vectors for expressing them, anti-IL2 antibodies, and dominant negative variants of IL2. These drugs are commercially available or can be appropriately produced on the basis of publicly known techniques.

[0170] Examples of the drug inhibiting the activity of MALT1 among the anti-apoptosis-related proteins that exhibit synthetic lethality when inhibited together with GST-π include, but are not limited to, RNAi molecules against DNA encoding MALT1, ribozymes, antisense nucleic acids, DNA/RNA chimeric polynucleotides, and vectors for expressing them, anti-MALT1 antibodies, and dominant negative variants of MALT1. These drugs are commercially available or can be appropriately produced on the basis of publicly known techniques.

[0171] Examples of the drug inhibiting the activity of MCL1 among the anti-apoptosis-related proteins that exhibit synthetic lethality when inhibited together with GST-π include, but are not limited to, Synribo (omacetaxine mepesuccinate), which is approved as a therapeutic agent for chronic myelocytic leukemia, RNAi molecules against DNA encoding MCL1, ribozymes, antisense nucleic acids, DNA/RNA chimeric polynucleotides, and vectors for expressing them, anti-MCL1 antibodies, and dominant negative variants of MCL1. These drugs are commercially available or can be appropriately produced on the basis of publicly known techniques.

[0172] Examples of the drug inhibiting the activity of MKL1 among the anti-apoptosis-related proteins that exhibit synthetic lethality when inhibited together with GST-π include, but are not limited to, RNAi molecules against DNA encoding MKL1, ribozymes, antisense nucleic acids, DNA/RNA chimeric polynucleotides, and vectors for expressing them, anti-MKL1 antibodies, and dominant negative variants of MKL1. These drugs are commercially available or can be appropriately produced on the basis of publicly known techniques.

[0173] Examples of the drug inhibiting the activity of MPO among the anti-apoptosis-related proteins that exhibit synthetic lethality when inhibited together with GST-π include, but are not limited to, RNAi molecules against DNA encoding MPO, ribozymes, antisense nucleic acids, DNA/RNA chimeric polynucleotides, and vectors for expressing them, anti-MPO antibodies, and dominant negative variants of MPO. These drugs are commercially available or can be appropriately produced on the basis of publicly known techniques.

[0174] Examples of the drug inhibiting the activity of MTL5 among the anti-apoptosis-related proteins that exhibit synthetic lethality when inhibited together with GST-π include, but are not limited to, RNAi molecules against DNA encoding MTL5, ribozymes, antisense nucleic acids, DNA/RNA chimeric polynucleotides, and vectors for expressing them, anti-MTL5 antibodies, and dominant negative variants of MTL5. These drugs are commercially available or can be appropriately produced on the basis of publicly known techniques.

[0175] Examples of the drug inhibiting the activity of MYBL2 among the anti-apoptosis-related proteins that exhibit synthetic lethality when inhibited together with GST-π include, but are not limited to, RNAi molecules against DNA encoding MYBL2, ribozymes, antisense nucleic acids, DNA/RNA chimeric polynucleotides, and vectors for expressing them, anti-MYBL2 antibodies, and dominant negative variants of MYBL2. These drugs are commercially available or can be appropriately produced on the basis of publicly known techniques.

[0176] Examples of the drug inhibiting the activity of MYO18A among the anti-apoptosis-related proteins that exhibit synthetic lethality when inhibited together with GST-π include, but are not limited to, RNAi molecules against DNA encoding MYO18A, ribozymes, antisense nucleic acids, DNA/RNA chimeric polynucleotides, and vectors for expressing them, anti-MYO18A antibodies, and dominant negative variants of MYO18A. These drugs are commercially available or can be appropriately produced on the basis of publicly known techniques.

[0177] On the other hand, examples of the drug inhibiting the activity of MTOR among the PI3K signaling pathway-related proteins that exhibit synthetic lethality when inhibited together with GST-π include, but are not limited to, Rapamycin (Chang et al., Trends Pharmacol. Sci. 12: 218-223. 1991), which is a low-molecular-weight compound serving as a macrolide immunosuppressant and inhibiting the activity of MTOR; Everolimus (Weisblum et al., Br. Med. Bull. 40: 47-53. 1984), which is a low-molecular-weight compound serving as a rapamycin-derived macrolide immunosuppressant and inhibiting the activity of MTOR; BEZ235 (Maira et al., Mol. Cancer Ther. 7 (7): 1851-1863. 2008), which is a low-molecular-weight compound serving as a PI3K tyrosine kinase inhibitor and inhibiting the activity of MTOR; AZD8055 (Huang et al., J Biol Chem. November 18; 286 (46): 40002-12. 2011), which is a low-molecular-weight compound selectively inhibiting the kinase activity of MTOR; PI-103 (Demyanets et al., 2010. Basic Res Cardiol. March; 106 (2): 217-31. 2011), which is a pyridinylfuranopyrimidine compound and is a low-molecular-weight compound inhibiting the kinase activity of DNA-PK, PI3K, and MTOR; and Niclosamide (Balgi et al., PLoS One. September 22; 4 (9): e7124. 2009), PP242 (Bao et al. J. Cell Biol. 210 (7): 1153-64. 2015), Timosaponin AIII (King et.al, PLoS One. September 30; 4 (9):e7283 2009), KU 0063794 (Garcia-Martinez et al. Biochem. J. 421 (1): 29-42. 2009), AZD2014 (Guichard et al. Mol. Cancer. Ther. 14 (11): 2508-18. 2015), Temsirolimus (Raymond et al. J. Clin. Oncol. 22: 2336-2347. 2004), Palomid 529 (Xue et al. Cancer Res. 68 (22): 9551-7. 2008), Fisetin (Suh et.al, Carcinogenesis. August; 31 (8):1424-33 2010), GDC-0980 (Wallin et al. Mol. Cancer Ther. 10 (12): 2426-36. 2011), SF1126 (Garlich et al. Cancer Res. 68 (1): 206-15. 2008), CH5132799 (Tanaka et al. Clin Cancer Res. 17 (10): 3272-81. 2011), WYE-354 (Yu et al. Cancer Res. 69 (15): 6232-40. 2009), Compound 401 (Ballou et al. J. Biol. Chem. 282, 24463. 2007), Ridaforolimus (Gadducci et al.: Gynecol. Endocrinol. 24, 239. 2008), GSK 1059615 (Steven et al. ACS. Med. Chem. Lett. 1 (1): 39-43 2010), PF-04691502 (Yuan et al. Mol. Cancer Ther. 10 (11): 2189-99. 2011), PP121 (Apsel et al. Nat. Chem. Biol. 4 (11): 691-9. 2008), OSI-027 (Bhaqwat et al. Mol. Cancer Ther. 10 (8): 1394-406. 2011), WYE-125132 (Yu et al. Cancer Res. 70 (2): 621-31. 2010), Umirolimus (Baldo et al. 2008. Curr. Cancer Drug Targets. 8 (8): 647-65. 2008), WAY-600 (Yu et al. Cancer Res. 69 (15): 6232-40. 2009), WYE-687 (Yu et al. Cancer Res. 69 (15): 6232-40. 2009), PKI-179 (Venkatesan et al. Bioorg. Med. Chem. Lett. 20 (19): 5869-73. 2010), PF-05212384 (Akintunde et al. J. Hematol. Oncol. 6: 88. 2013), CAY10626 (Rameh et al. J. Biol. Chem. 274: 8347-8350. 1999), NVP-BGT226 (Chang et al. Clin. Cancer Res. 17 (22): 7116-26. 2011), XL-147 derivative 1 (Akintunde et al. J. Hematol. Oncol. 6: 88. 2013), XL 388 (Eduardo et al. Mol Cancer Ther. 10 (3): 395-403. 2011), Torin 1 (Liu et al. J. Med. Chem. 53 (19): 7146-55. 2010) and RNAi molecules against DNA encoding MTOR, ribozymes, antisense nucleic acids, DNA/RNA chimeric polynucleotides, and vectors for expressing them, anti-MTOR antibodies, and dominant negative variants of MTOR. These drugs are commercially available or can be appropriately produced on the basis of publicly known techniques.

[0178] Examples of the drug inhibiting the activity of IRAK1 among the PI3K signaling pathway-related proteins that exhibit synthetic lethality when inhibited together with GST-π include, but are not limited to, Interleukin-1 Receptor-Associated-Kinase-1/4 Inhibitor (Bhattacharyya et al., Am. J. Physiol. Gastrointest. Liver Physiol. 293, G429. 2007), which is a benzimidazole compound and is a low-molecular-weight compound specifically inhibiting the activity of IL-1 kinase; and RNAi molecules against DNA encoding IRAK1, ribozymes, antisense nucleic acids, DNA/RNA chimeric polynucleotides, and vectors for expressing them, anti-IRAK1 antibodies, and dominant negative variants of IRAK1. These drugs are commercially available or can be appropriately produced on the basis of publicly known techniques.

[0179] Examples of the drug inhibiting the activity of IRS1 among the PI3K signaling pathway-related proteins that exhibit synthetic lethality when inhibited together with GST-π include, but are not limited to, RNAi molecules against DNA encoding IRS1, ribozymes, antisense nucleic acids, DNA/RNA chimeric polynucleotides, and vectors for expressing them, anti-IRS1 antibodies, and dominant negative variants of IRS1. These drugs are commercially available or can be appropriately produced on the basis of publicly known techniques.

[0180] Examples of the drug inhibiting the activity of MYD88 among the PI3K signaling pathway-related proteins that exhibit synthetic lethality when inhibited together with GST-π include, but are not limited to, MyD88 Inhibitory Peptide Pepinh-MYD (Derossi et al., J. Biol. Chem., 269: 10444-50. 1994), which is a MYD88-derived 26-amino acid peptide inhibiting homodimerization; TJ-M2010 (Li et al., Transplant Proc. 45 (5): 1842-5. 2013), which is a low-molecular-weight compound specifically inhibiting MYD88; and RNAi molecules against DNA encoding MYD88, ribozymes, antisense nucleic acids, DNA/RNA chimeric polynucleotides, and vectors for expressing them, anti-MYD88 antibodies, and dominant negative variants of MYD88. These drugs are commercially available or can be appropriately produced on the basis of publicly known techniques.

[0181] Examples of the drug inhibiting the activity of NFKB1 among the PI3K signaling pathway-related proteins that exhibit synthetic lethality when inhibited together with GST-π include, but are not limited to, BAY 11-7085 (Pierce et al., J. Biol. Chem. 272: 21096-21103. 1997), which is a low-molecular-weight compound inhibiting the activity of both NF-κB activation and IκBα phosphorylation; Helenalin (Lyss et al., J. Biol. Chem. 273 (50): 33508-16. 1998), which is a low-molecular-weight compound serving as an apoptosis-inducing anticancer agent and inhibiting NF-κB; Caffeic Acid Phenethyl Ester (Sud'ina et al., FEBS Lett. August 23; 329 (1-2): 21-4. 1993), which is a low-molecular-weight compound serving as an inhibitor of HIV integrase and tyrosine kinase and specifically inhibiting the activity of NF-κB; and NFκB Activation Inhibitor II, JSH-23 (Shin et al., FEBS Lett. 571: 50-54. 2004), QNZ (Tobe et al. Bioorg. Med. Chem. 11: 3869-3878. 2003), Andrographolide (Yu et al. Planta Med. December; 69 (12):1075-9. 2003), Curcumin (Asai et al. J. Nutr. 131: 2932-2935. 2001), Aspirin (Kopp et al. Science. 265: 956-959. 1994), Sulfasalazine (Liptay et al. Br. J. Pharmacol. 128, 1361. 1999), Rocaglamide (Engelmeier et al. J. Agric. Food Chem. 48: 1400-1404. 2000), SM 7368 (Lee et al. Biochem. Biophys. Res. Commun. 336: 716-722. 2005), Sulindac Sulfide (Meade et al. J. Biol. Chem. 268: 6610-6614. 1993), Trichodion (Erkel et al. FEBS Lett. 477, 219. 2000), CHS-828 (Hovstadius et al. Clin. Cancer Res. 8 (9): 2843-50. 2002), Z-VRPR-FMK (Hailfinger et al. Proc. Natl. Acad. Sci. U.S.A. 106 (47): 19946-19951. 2009), Sodium Salicylate (Kopp et al. Science. 265: 956-959. 1994), 4-Aminosalicylic Acid (Eberhardt et al. Biochem. Biophys. Res. Commun. 200: 163-170. 1994), Ethyl 3,4-Dihydroxycinnamate (Nakayama et al. Biosci. Biotechnol. Biochem. 60: 316-318. 1996), CAY10512 (Heynekamp et al. J Med Chem 49 7182-7189 2006), N-Stearoyl Phytosphingosine (Ryu et al. Lipids. 45 (7): 613-8. 2010), Palmitic Acid Methyl Ester (Cal et al. Toxicology. 210: 197-204. 2005), 9-Methylstreptimidone (Ishikawa et al. Bioorg. Med. Chem. Lett. 19 (6): 1726-8. 2009), Rocaglaol (Engelmeier et al. J. Agric. Food Chem. 48: 1400-1404. 2000), BAY 11-7082 (Pierce et al. J. Biol. Chem. 272: 21096-21103. 1997), and RNAi molecules against DNA encoding NFKB1, ribozymes, antisense nucleic acids, DNA/RNA chimeric polynucleotides, and vectors for expressing them, anti-NFKB1 antibodies, and dominant negative variants of NFKB1. These drugs are commercially available or can be appropriately produced on the basis of publicly known techniques.

[0182] Examples of the drug inhibiting the activity of PIK3CG among the PI3K signaling pathway-related proteins that exhibit synthetic lethality when inhibited together with GST-π include, but are not limited to, CUDC-907 (Qian et al., Clin Cancer Res. 18 (15): 4104-4113. 2012), which is a low-molecular-weight compound specifically inhibiting the activity of both HDAC and PI3K; PKI-402 (Dehnhardt et al., J Med Chem. January 28; 53 (2): 798-810. 2010), which is a low-molecular-weight compound specifically inhibiting the activity of both PI3K and mTOR; PF-04691502 (Yuan et al., Mol Cancer Ther, 10 (11), 2189-2199. 2011), which is a low-molecular-weight compound specifically inhibiting the activity of both PI3K and mTOR; NVP-BGT226 (Glienke et al., Tumor Biology, 33 (3): 757-765. 2012), which is a low-molecular-weight compound specifically inhibiting the activity of both PI3K and mTOR; and IPI-145 (INK1197) (Winkler et al., Chem Biol. 2013 Nov. 21; 20 (11): 1364-74. 2013), SAR245409 (XL765) (Dai et.al, Endocrinology. March; 154 (3):1247-592013), ZSTK474 (Toyama et.al, Arthritis Res Ther. 12 (3): R92. 2010), VS-5584 (SB2343) (Hart et.al, Mol Cancer Ther. 2013 February; 12 (2):151-61. 2013), AS-605240 (Camps et.al, Nature medicine, 11 (9): 936-943. 2005), PIK-90 (Van et.al, J Cell Biol. 2006 Jul. 31; 174 (3):437-45. 2006), PF-4989216 (Walls et.al, Clin Cancer Res. 2014 Feb. 1; 20 (3):631-43. 2014), TG100-115 (Walls et.al, Proc Natl Acad Sci USA. December 26; 103 (52):19866-71. 2006), BKM120 (Bendell et.al, J. Clin. Oncol. 30 (3): 282-90. 2012), BEZ235 Tosylate (Maira et.al, Mol Cancer Ther 2008; 7: 1851-1863. 2008), LY294002 (Maira et.al, Biochem. Soc. Trans. 37 (Pa): 265-72. 2009), PI-103 (Raynaud et.al, Molecular Cancer Therapeutics, 8 (7): 1725-1738. 2009), XL147 (Shapiro et.al, Proc 97th Annu Meet AACR, 14-18. 2007), AS-252424 (Pomel et.al, J Med Chem. June 29; 49 (13):3857-71. 2006), AS-604850 (Camps et.al, Nature medicine, 11 (9): 936-943. 2005), CAY10505 (Tyagi et.al, Can J Physiol Pharmacol. July; 90 (7):881-5. 2012), CH5132799 (Ohwada et.al, Bioorganic & medicinal chemistry letters, 21 (6): 1767-1772. 2011), BAY 80-6946 (Copanlisib) (Patnaik et.al, J Clin Oncol, 29, 2011), GDC-0032 (Ndubaku et.al, J Med Chem. June 13; 56 (11):4597-610. 2013), GSK1059615 (Knight et.al, ACS Medicinal Chemistry Letters, 1 (1): 39-43. 2010), CAL-130 (Subramaniam et.al, Cancer Cell. 21 (4):459-72. 2012), XL765 (Laird et.al, AACR-NCI-EORTC International Conference on Molecular Targets and Cancer Therapeutics. October p. B250 2007), and RNAi molecules against DNA encoding PIK3CG, ribozymes, antisense nucleic acids, DNA/RNA chimeric polynucleotides, and vectors for expressing them, anti-PIK3CG antibodies, and dominant negative variants of PIK3CG. These drugs are commercially available or can be appropriately produced on the basis of publicly known techniques.

[0183] Examples of the drug inhibiting the activity of RAC1 among the PI3K signaling pathway-related proteins that exhibit synthetic lethality when inhibited together with GST-π include, but are not limited to, NSC 23766 (Gao et al., Proc. Natl. Acad. Sci. U.S.A. 101: 7618-7623. 2004), which is a low-molecular-weight compound specifically inhibiting the activity of Rac GTPase; W56 (Gao et al., J. Biol. Chem. 276 47530. 2001), which is a peptide derived from guanine nucleotide exchange factor recognition/activation site of RAC1; and RNAi molecules against DNA encoding RAC1, ribozymes, antisense nucleic acids, DNA/RNA chimeric polynucleotides, and vectors for expressing them, anti-RAC1 antibodies, and dominant negative variants of RAC1. These drugs are commercially available or can be appropriately produced on the basis of publicly known techniques.

[0184] Examples of the drug inhibiting the activity of AKT3 among the PI3K signaling pathway-related proteins that exhibit synthetic lethality when inhibited together with GST-π include, but are not limited to, MK-2206 Dihydrochloride (Hirai et al., Mol. Cancer ther. 9 (7): 1956-67. 2010), which is a low-molecular-weight compound specifically inhibiting the activity of Akt1, Akt2, and Akt3; Triciribine (Moore et al., Biochem. Pharmacol. 38: 4037-4044. 1989), which is a low-molecular-weight compound specifically inhibiting the activity of Akt; Akt Inhibitor VIII (Barnett et al., Biochem. J. 385: 399-408. 2005), which is a cell-permeable quinoxaline compound and is a low-molecular-weight compound specifically inhibiting the activity of Akt1, Akt2, and Akt3; GSK 690693 (Rhodes et al., Cancer Res. 68 (7): 2366-2374. 2008), which is a compound derived from Aminofurazan and is a low-molecular-weight compound specifically inhibiting the activity of Akt1, Akt2, and Akt3; AT7867 (Grimshaw et al., Mol. Cancer Ther. 9 (5): 1100-10. 2010), which is a low-molecular-weight compound specifically inhibiting the activity of Akt1, Akt2, and Akt3; and RNAi molecules against DNA encoding AKT3, ribozymes, antisense nucleic acids, DNA/RNA chimeric polynucleotides, and vectors for expressing them, anti-AKT3 antibodies, and dominant negative variants of AKT3. These drugs are commercially available or can be appropriately produced on the basis of publicly known techniques.

[0185] Examples of the drug inhibiting the activity of EIF4B among the PI3K signaling pathway-related proteins that exhibit synthetic lethality when inhibited together with GST-π include, but are not limited to, RNAi molecules against DNA encoding EIF4B, ribozymes, antisense nucleic acids, DNA/RNA chimeric polynucleotides, and vectors for expressing them, anti-EIF4B antibodies, and dominant negative variants of EIF4B. These drugs are commercially available or can be appropriately produced on the basis of publicly known techniques.

[0186] Examples of the drug inhibiting the activity of EIF4E among the PI3K signaling pathway-related proteins that exhibit synthetic lethality when inhibited together with GST-πinclude, but are not limited to, 4EGI-1 (Moerke et al., Cell. 128: 257-267. 2007), which is a low-molecular-weight compound specifically inhibiting EIF4E/EIF4G interaction; and RNAi molecules against DNA encoding EIF4E, ribozymes, antisense nucleic acids, DNA/RNA chimeric polynucleotides, and vectors for expressing them, anti-EIF4E antibodies, and dominant negative variants of EIF4E. These drugs are commercially available or can be appropriately produced on the basis of publicly known techniques.

[0187] Examples of the drug inhibiting the activity of ILK among the PI3K signaling pathway-related proteins that exhibit synthetic lethality when inhibited together with GST-π include, but are not limited to, Cpd 22 (Lee et al., J. Med. Chem. 54, 6364. 2011), which is a cell-permeable pyrazole compound and is a low-molecular-weight compound specifically inhibiting ILK; QLT0267 (Younes et al., Mol Cancer Ther. August; 4 (8): 1146-56. 2005), which is a low-molecular-weight compound specifically inhibiting the kinase activity of ILK; and RNAi molecules against DNA encoding ILK, ribozymes, antisense nucleic acids, DNA/RNA chimeric polynucleotides, and vectors for expressing them, anti-ILK antibodies, and dominant negative variants of ILK. These drugs are commercially available or can be appropriately produced on the basis of publicly known techniques.

[0188] Examples of the drug inhibiting the activity of MTCP1 among the PI3K signaling pathway-related proteins that exhibit synthetic lethality when inhibited together with GST-π include, but are not limited to, RNAi molecules against DNA encoding MTCP1, ribozymes, antisense nucleic acids, DNA/RNA chimeric polynucleotides, and vectors for expressing them, anti-MTCP1 antibodies, and dominant negative variants of MTCP1. These drugs are commercially available or can be appropriately produced on the basis of publicly known techniques.

[0189] Examples of the drug inhibiting the activity of PIK3CA among the PI3K signaling pathway-related proteins that exhibit synthetic lethality when inhibited together with GST-π include, but are not limited to, HS-173 (Lee et al., Cancer Lett. January 1; 328 (1): 152-9. 2013), which is a low-molecular-weight compound specifically inhibiting PI3K; CUDC-907 (Qian et al., Clin Cancer Res. 18 (15): 4104-4113. 2012), which is a low-molecular-weight compound specifically inhibiting the activity of both HDAC and PI3K; PKI-402 (Dehnhardt et al., J Med Chem. January 28; 53 (2): 798-810. 2010), which is a low-molecular-weight compound specifically inhibiting the activity of both PI3K and mTOR; PF-04691502 (Yuan et al., Mol Cancer Ther, 10 (11), 2189-2199. 2011), which is a low-molecular-weight compound specifically inhibiting the activity of both PI3K and mTOR; NVP-BGT226 (Glienke et al., Tumor Biology, 33 (3): 757-765. 2012), which is a low-molecular-weight compound specifically inhibiting the activity of both PI3K and mTOR; and BYL719 (Furet et al., Bioorg Med Chem Lett 2013; 23: 3741-3748. 2013), SAR245409 (XL765) (Dai et.al, Endocrinology. March; 154 (3):1247-592013), ZSTK474 (Toyama et.al, Arthritis Res Ther. 12 (3): R92. 2010), VS-5584 (SB2343) (Hart et.al, Mol Cancer Ther. 2013 February; 12 (2):151-61. 2013), PIK-75 (Zheng et.al, Mol Pharmacol. October; 80 (4):657-64. 2011), PIK-90 (Van et.al, J Cell Biol. 2006 Jul. 31; 174 (3):437-45. 2006), A66 (Jamieson et.al, Biochem J. 438:53-62. 2011), CNX1351 (Nacht et.al, J Med Chem, 56 (3): 712-721. 2013), PF-4989216 (Walls et.al, Clin Cancer Res. 2014 Feb. 1; 20 (3):631-43. 2014), BKM120 (Bendell et.al, J. Clin. Oncol. 30 (3): 282-90. 2012), BEZ235 Tosylate (Maira et.al, Mol Cancer Ther 2008; 7: 1851-1863. 2008), LY294002 (Maira et.al, Biochem. Soc. Trans. 37 (PO): 265-72. 2009), PI-103 (Raynaud et.al, Molecular Cancer Therapeutics, 8 (7): 1725-1738. 2009), XL147 (Shapiro et.al, Proc 97th Annu Meet AACR, 14-18. 2007), CH5132799 (Ohwada et.al, Bioorganic & medicinal chemistry letters, 21 (6): 1767-1772. 2011), BAY 80-6946 (Copanlisib) (Patnaik et.al, J Clin Oncol, 29, 2011), GDC-0032 (Ndubaku et.al, J Med Chem. June 13; 56 (11):4597-610. 2013), XL765 (Laird et.al, AACR-NCI-EORTC International Conference on Molecular Targets and Cancer Therapeutics. October p.B250 2007), and RNAi molecules against DNA encoding PIK3CA, ribozymes, antisense nucleic acids, DNA/RNA chimeric polynucleotides, and vectors for expressing them, anti-PIK3CA antibodies, and dominant negative variants of PIK3CA. These drugs are commercially available or can be appropriately produced on the basis of publicly known techniques.

[0190] Examples of the drug inhibiting the activity of SRF among the PI3K signaling pathway-related proteins that exhibit synthetic lethality when inhibited together with GST-πinclude, but are not limited to, CCG-1423 (Evelyn et al., Mol. Cancer Ther. 6, 2249. 2007), which is a cell-permeable benzamide compound and is a low-molecular-weight compound specifically inhibiting the RHO signaling pathway and SRF activation; CCG-100602 (Evelyn, et al., Bioorg Med Chem Lett 20 665-72. 2010), which is a CCG-1423 analog and is a low-molecular-weight compound specifically inhibiting the RHO signaling pathway and SRF activation; and RNAi molecules against DNA encoding SRF, ribozymes, antisense nucleic acids, DNA/RNA chimeric polynucleotides, and vectors for expressing them, anti-SRF antibodies, and dominant negative variants of SRF. These drugs are commercially available or can be appropriately produced on the basis of publicly known techniques.

[0191] Particularly, RNAi molecules against DNA encoding the protein, ribozymes, antisense nucleic acids, DNA/RNA chimeric polynucleotides, and vectors for expressing them are preferable as the drug inhibiting the production or activity of the cell cycle-regulating protein (e.g., p21) or anti-apoptosis-related protein or PI3K signaling pathway-related protein that exhibits synthetic lethality when inhibited together with GST-π, because of high specificity and a low possibility of adverse reactions.

[0192] The inhibition of the homeostasis-related protein can be determined when the expression or activity of the protein in the cell is inhibited as compared with the case the agent inhibiting the protein is not allowed to act thereon. The expression of the protein can be evaluated without limitations by a known arbitrary approach, for example, an immunoprecipitation method using an antibody, EIA, ELISA, IRA, IRMA, Western blotting, an immunohistochemical method, an immunocytochemical method, flow cytometry, or various hybridization methods, Northern blotting, Southern blotting, or various PCR methods which employ nucleic acids specifically hybridizing to a nucleic acid encoding the protein or a unique fragment thereof, or a transcript (e.g., mRNA) or a splicing product of the nucleic acid.

[0193] Also, the activity of, for example, p21 can be evaluated without limitations by analyzing the known activity of p21, for example, binding activity against cyclin-CDK2 or a cyclin-CDK1 complex by a known arbitrary method, for example, an immunoprecipitation method, Western blotting, mass spectrometry, a pull-down method, or a surface plasmon resonance (SPR) method.

[0194] As used herein, the RNAi molecule refers to an arbitrary molecule that brings about RNA interference. The RNAi molecule is not limited and includes double-stranded RNAs such as siRNA (small interfering RNA), miRNA (micro RNA), shRNA (short hairpin RNA), ddRNA (DNA-directed RNA), piRNA (Piwi-interacting RNA), rasiRNA (repeat associated siRNA), and alternatives thereof, and the like. These RNAi molecules are commercially available or may be designed and prepared on the basis of publicly known sequence information, i.e., the nucleotide sequences and/or amino acid sequences shown in SEQ ID NOs: 1 to 30, 39 to 108.

[0195] As used herein, the antisense nucleic acid includes RNA, DNA, PNA, or complexes thereof.

[0196] As used herein, the DNA/RNA chimeric polynucleotide is not limited and includes, for example, a double-stranded polynucleotide described in JP Patent Publication (Kokai) No. 2003-219893 A (2003) which consists of DNA and RNA and inhibits the expression of a target gene.

[0197] The drug inhibiting GST-π and the drug inhibiting a homeostasis-related protein that exhibits synthetic lethality when inhibited together with GST-π may be contained in a single preparation or may be separately contained in two or more preparations. In the latter case, these preparations may be administered at the same time or may be administered in a staggered manner. In the case of administration in a staggered manner, the preparation containing the drug inhibiting GST-π may be administered before or after the administration of the preparation containing the drug inhibiting a homeostasis-related protein that exhibits synthetic lethality when inhibited together with GST-π.

[0198] The cell death-inducing agent and the cell growth-inhibiting agent according to the present invention may comprise one type of the aforementioned homeostasis-related protein, or two or more types the aforementioned homeostasis-related protein. For example, two or more types of cell cycle-regulating protein; two or more types of anti-apoptosis-related proteins; or one or more types of cell cycle-regulating proteins and one or more types of anti-apoptosis-related proteins may be used as homeostasis-related proteins included in the cell death-inducing agent and the cell growth-inhibiting agent according to the present invention.

[0199] Incidentally, ATM, CDC25A, p21, PRKDC, RBBP8, SKP2, MCM10, RNPC1, CCNL1, CENPH, BRSK1, MYLK, MCM8, CCNB3, MCMDC1, AATF, AKT1, ALOX12, ANXA1, ANXA4, API5, ATF5, AVEN, AZU1, BAG1, BCL2L1, BFAR, CFLAR, IL2, MALT1, MCL1, MKL1, MPO, MTL5, MYBL2, MYO18A, MTOR, IRAK1, IRS1, MYD88, NFKB1, PIK3CG, RAC1, AKT3, EIF4B, EIF4E, ILK, MTCP1, PIK3CA and SRF are each a homeostasis-related protein that exhibits synthetic lethality for a cancer cell when inhibited together with GST-π. Accordingly, the drug inhibiting the protein serves as an active ingredient for an agent or a composition which potentiates the induction of cell death and/or the inhibition of cell growth by the drug inhibiting GST-π (hereinafter, also referred to as a “cell death induction-potentiating agent”, a “cell growth inhibition-potentiating agent”, a “composition for the potentiation of cell death induction”, or a “composition for the potentiation of cell growth inhibition”). In other words, the induction of cell death and/or the inhibition of cell growth by the administration of the drug inhibiting GST-π can be potentiated by administering an effective amount of the drug inhibiting the protein.

[0200] The content of the active ingredient in the agent or the composition of the present invention may be an amount that induces cell death such as apoptosis and/or inhibits cell growth when the agent or the composition is administered. Also, an amount that does not have adverse effect exceeding advantages brought about by administration is preferable. Such an amount is publicly known or can be appropriately determined by an in vitro test using cultured cells or the like or by a test in model animals such as mice, rats, dogs, or pigs. Such a testing method is well known to those skilled in the art. The induction of apoptosis can be evaluated by various known approaches, for example, the detection of apoptosis-specific phenomena such as DNA fragmentation, binding of annexin V to a cell membrane, change in mitochondrial membrane potential, and activation of caspase, and TUNEL staining. Also, the inhibition of cell growth can be evaluated by various known approaches, for example, the time-dependent measurement of the number of live cells, the measurement of the size, volume, or weight of tumor, the measurement of the amount of DNA synthesized, a WST-1 method, a BrdU (bromodeoxyuridine) method, and a 3H thymidine incorporation method. The content of the active ingredient can vary depending on the dosage form of the agent or the composition. For example, in the case of using a plurality of units of compositions in one administration, the amount of the active ingredient contained in one composition unit can be set to 1/a plurality of amounts of the active ingredient necessary for one administration. Such adjustment of the content can be appropriately carried out by those skilled in the art.

[0201] Moreover, the drug inhibiting GST-π and the drug inhibiting a homeostasis-related protein that exhibits synthetic lethality when inhibited together with GST-π can be formulated as active ingredients to thereby produce a cell death-inducing agent, a cell growth-inhibiting agent, a composition for cell death induction, or a composition for cell growth inhibition.

[0202] Furthermore, a combination of the drug inhibiting GST-π and the drug inhibiting a homeostasis-related protein that exhibits synthetic lethality when inhibited together with GST-π for use in cell death induction or cell growth inhibition can be provided. In addition, a method for inducing cell death or a method for inhibiting cell growth, comprising administering effective amounts of the drug inhibiting GST-π and the drug inhibiting a homeostasis-related protein that exhibits synthetic lethality when inhibited together with GST-π can be provided.

[0203] All of the aforementioned methods for inducing cell death such as apoptosis or inhibiting cell growth may be in vitro methods or may be in vivo methods. The drugs for these methods are as already mentioned above, and the effective amount of each drug may be an amount that induces cell death such as apoptosis and/or inhibits cell growth in the recipient cell. Also, an amount that does not have adverse effect exceeding advantages brought about by administration is preferable. Such an amount is publicly known or can be appropriately determined by an in vitro test using cultured cells. Such a testing method is well known to those skilled in the art. The induction of cell death or the inhibition of cell growth can be evaluated by various known approaches including those mentioned above. When the drug is administered to a predetermined cancer cell population, the effective amount does not have to bring about cell death or growth inhibition for all cells in this cell population. The effective amount may be, for example, an amount that brings about apoptosis or growth inhibition for 1% or more, 2% or more, 3% or more, 4% or more, 5% or more, 6% or more, 8% or more, 10% or more, 12% or more, 15% or more, 20% or more, and 25% or more of the cells in the cell population.

[0204] The cell death-inducing agent or the cell growth-inhibiting agent of the present invention can effectively induce cell death or inhibit cell growth even for a cancer cell and as such, is effective as an ingredient for a pharmaceutical composition for a disease caused by abnormal cell growth. Also, the drug inhibiting GST-π and the drug inhibiting a homeostasis-related protein that exhibits synthetic lethality when inhibited together with GST-π can be formulated as active ingredients to thereby produce a pharmaceutical composition for a disease caused by abnormal cell growth. Furthermore, the treatment or therapy of a disease caused by abnormal cell growth, comprising administering an effective amount of the produced pharmaceutical composition to a subject in need thereof can be provided.

[0205] The pharmaceutical composition is effective for treating a disease caused by abnormal cell growth, particularly, for treating a disease having cell death or abnormal cell growth by expressing mutated KRAS.

[0206] The disease caused by a cell expressing mutated KRAS is not limited and includes, for example, benign or malignant tumors (also referred to as cancers or malignant neoplasms), hyperplasia, keloid, Cushing syndrome, primary aldosteronism, erythroplakia, polycythemia vera, leukoplakia, hyperplastic scar, lichen planus, and lentiginosis.

[0207] Examples of the cancer according to the present invention include cancers, cancers highly expressing GST-π, and cancers caused by cells expressing mutated KRAS (also simply referred to as KRAS cancers). In many cases, the KRAS cancers are included in the cancers highly expressing GST-π. Examples thereof include, but are not limited to: sarcomas such as fibrosarcoma, malignant fibrous histiocytoma, liposarcoma, rhabdomyosarcoma, leiomyosarcoma, angiosarcoma, Kaposi's sarcoma, lymphangiosarcoma, synovial sarcoma, chondrosarcoma, and osteosarcoma; carcinomas such as brain tumor, head and neck cancer, breast cancer, lung cancer, esophageal cancer, stomach cancer, duodenal cancer, appendix cancer colorectal cancer, rectal cancer, liver cancer, pancreatic cancer, gallbladder cancer, bile duct cancer, anus cancer, kidney cancer, urethral cancer, urinary bladder cancer, prostate cancer, penis cancer, testis cancer, uterine cancer, ovary cancer, vulval cancer, vaginal cancer, and skin cancer; and leukemia and malignant lymphoma. In the present invention, the “cancer” includes epithelial malignant tumors and non-epithelial malignant tumors. The cancer according to the present invention may be present in an arbitrary site of the body, for example, the brain, the head and neck region, the chest, the extremities, the lung, the heart, thymus glands, the esophagus, the stomach, the small intestine (duodenum, jejunum, and ileum), the large intestine (colon, cecum, appendix, and rectum), the liver, the pancreas, the gallbladder, the anus, the kidney, urinary ducts, the urinary bladder, the prostate, the penis, the testis, the uterus, the ovary, the vulva, the vagina, the skin, striated muscles, smooth muscles, synovial membranes, cartilage, bone, thyroid glands, adrenal glands, the peritoneum, the mesenterium, bone marrow, blood, the vascular system, the lymphatic system such as lymph nodes, or lymph.

[0208] For the pharmaceutical composition, the drug inhibiting GST-π and the drug inhibiting a homeostasis-related protein that exhibits synthetic lethality when inhibited together with GST-π may be used in combination with an additional active ingredient. In this context, the use in combination includes, for example, the administration of the additional active ingredient as another preparation, and the administration of the additional active ingredient as a combination drug with at least one of the other drugs. In the case of administration as another preparation, the preparation containing the additional active ingredient may be administered before, at the same time with, or after the administration of the other preparation(s).

[0209] Examples of such an additional active ingredient include ones effective for the treatment of the disease of interest. For example, when the disease to be treated is a cancer, an anticancer agent can be used in combination therewith. Examples of the anticancer agent can include: alkylating agents such as ifosfamide, nimustine hydrochloride, cyclophosphamide, dacarbazine, melphalan, and ranimustine; metabolic antagonists such as gemcitabine hydrochloride, enocitabine, cytarabine ocfosfate, cytarabine preparations, tegafur uracil, tegafur-gimeracil-oteracil potassium combination drugs (e.g., TS-1), doxifluridine, hydroxycarbamide, fluorouracil, methotrexate, and mercaptopurine; antitumor antibiotics such as idarubicin hydrochloride, epirubicin hydrochloride, daunorubicin hydrochloride, daunorubicin citrate, doxorubicin hydrochloride, pirarubicin hydrochloride, bleomycin hydrochloride, peplomycin sulfate, mitoxantrone hydrochloride, and mitomycin C; alkaloids such as etoposide, irinotecan hydrochloride, vinorelbine tartrate, docetaxel hydrate, paclitaxel, vincristine sulfate, vindesine sulfate, and vinblastine sulfate; hormone therapy agents such as anastrozole, tamoxifen citrate, toremifene citrate, bicalutamide, flutamide, and estramustine phosphate; platinum complexes such as carboplatin, cisplatin (CDDP), and nedaplatin; anti-angiogenic agents such as thalidomide, Neovastat, and bevacizumab; and L-asparaginase.

[0210] When the active ingredients in various agents or compositions, the method of treating a subject, etc., of the present invention described herein are nucleic acids, for example, RNAi molecules, ribozymes, antisense nucleic acids, or DNA/RNA chimeric polynucleotides, they may be used directly as naked nucleic acids or may be supported by various vectors. Publicly known arbitrary vectors such as plasmid vectors, phage vectors, phagemid vectors, cosmid vectors, or virus vectors can be used as the vectors. It is preferable that the vectors should contain at least a promoter that potentiates the expression of each nucleic acid to be carried. In this case, it is preferable that the nucleic acid should be operably linked to such a promoter. The nucleic acid operably linked to the promoter means that the nucleic acid and the promoter are located such that the protein encoded by the nucleic acid is properly produced by the action of the promoter. The vectors may or may not be replicable in host cells. Also, the transcription of the gene may be performed outside the nuclei of the host cells or may be performed inside the nuclei thereof. In the latter case, the nucleic acid may be integrated into the genomes of the host cells.

[0211] Alternatively, the active ingredients may be supported by various non-viral lipid or protein carriers. Examples of such carriers include, but are not limited to, cholesterols, liposomes, antibody protomers, cyclodextrin nanoparticles, fusion peptides, aptamers, biodegradable polylactic acid copolymers, and polymers, which can enhance the efficiency of cellular uptake (see e.g., Pirollo and Chang, Cancer Res. 2008; 68 (5): 1247-50). Particularly, cationic liposomes or polymers (e.g., polyethyleneimine) are useful. Further examples of the polymers useful as such carriers include those described in, for example, US 2008/0207553 and US 2008/0312174.

[0212] In various pharmaceutical compositions of the present invention described herein, the active ingredients may be combined with an additional arbitrary ingredient unless the effects of the active ingredients are impaired. Examples of such an arbitrary ingredient include other chemotherapeutic agents, pharmacologically acceptable carriers, excipients, and diluents. Furthermore, the compositions may be coated with suitable materials, for example, enteric coatings or time-controlled disintegrating materials, according to administration routes, drug release manners, etc., and may be incorporated into suitable drug release systems.

[0213] Various agents and compositions (including various pharmaceutical compositions) of the present invention described herein may be administered without limitations through various routes including both oral and parenteral routes, for example, oral, intravenous, intramuscular, subcutaneous, local, intratumoral, rectal, intraarterial, intraportal, intraventricular, transmucosal, percutaneous, nasal, intraperitoneal, intrapulmonary, and intrauterine routes, or may be prepared into dosage forms suitable for each administration route. Arbitrary publicly known ones can be appropriately adopted for such dosage forms and preparation methods (see e.g., Hyoujun Yakuzai Gaku (Standard Pharmaceutics in English), edited by Yoshiteru Watanabe et al., Nankodo Co., Ltd., 2003).

[0214] Examples of the dosage form suitable for oral administration include, but are not limited to, powders, granules, tablets, capsules, solutions, suspensions, emulsions, gels, and syrups. Also, examples of the dosage form suitable for parenteral administration include injections such as injections in a solution state, injections in a suspension state, injections in an emulsion state, and injections of type to be prepared before use. The preparations for parenteral administration can be in the form of an aqueous or nonaqueous isotonic sterile solution or suspension.

[0215] Various agents or compositions (including various pharmaceutical compositions) of the present invention described herein may be prepared to target particular tissues or cells. The targeting can be achieved by a known arbitrary approach. In the case of intending delivery to a cancer, for example, an approach such as passive targeting by setting the size of a preparation to a diameter of 50 to 200 μm, particularly, 75 to 150 μm, suitable for the exertion of EPR (enhanced permeability and retention) effects, or active targeting using a ligand such as CD19, HER2, transferrin receptor, folate receptor, VIP receptor, EGFR (Torchilin, AAPS J. 2007; 9 (2): E128-47), RAAG10 (JP Patent Publication (Kohyo) No. 2005-532050 A (2005)), PIPA (JP Patent Publication (Kohyo) No. 2006-506071 A (2006)), or KID3 (JP Patent Publication (Kohyo) No. 2007-529197 A (2007)), a peptide having an RGD motif or an NGR motif, F3, LyP-1 (Ruoslahti et al., J Cell Biol. 2010; 188 (6): 759-68), or the like as a targeting agent can be used without limitations. Since it is also known that retinoid or a derivative thereof is useful as a targeting agent for a cancer cell (WO 2008/120815), a carrier comprising retinoid as a targeting agent may be used. Such a carrier is described in WO 2009/036368, WO 2010/014117, WO 2012/170952, etc., in addition to the above literature.

[0216] Various agents or compositions (including various pharmaceutical compositions) of the present invention described herein can be supplied in any form and may be provided in a form that can be prepared before use, for example, a form that can be prepared by a physician and/or a pharmacist, a nurse, or other paramedical persons in a medical setting or in the neighborhood thereof, from the viewpoint of preservation stability. Such a form is particularly useful when the agent or the composition of the present invention comprises ingredients difficult to stably preserve, such as lipids, proteins, or nucleic acids. In this case, the agent or the composition of the present invention is provided as one or two or more containers comprising at least one of the components essential therefor, and is prepared before use, for example, within 24 hours before use, preferably within 3 hours before use, more preferably immediately before use. For the preparation, a reagent, a solvent, a prescription instrument, or the like usually available in the preparation location can be appropriately used.

[0217] Thus, the present invention also relates to a composition preparation kit comprising one or two or more containers comprising one or a combination of the active ingredients that may be contained in various agents or compositions of the present invention, and necessary components for various agents or compositions which are provided in the form of such a kit. The kit of the present invention may additionally comprise an instruction, for example, a manual or an electronic recording medium (CD or DVD), describing preparation methods, a method of treating a subject, etc., for various agents or compositions of the present invention. Also, the kit of the present invention may comprise all of the components for completing various agents or compositions of the present invention, but is not necessarily required to comprise all of the components. Thus, the kit of the present invention may not comprise a reagent or a solvent usually available in a medical setting, an experimental facility, or the like, for example, sterile water, saline, or a glucose solution.

[0218] The effective amount for various methods of treating a subject of the present invention described herein is, for example, an amount that reduces the symptoms of a disease or delays or terminates the progression of the disease, and is preferably an amount that inhibits or cures the disease. Also, an amount that does not have adverse effect exceeding advantages brought about by administration is preferable. Such an amount can be appropriately determined by an in vitro test using cultured cells or the like or by a test in model animals such as mice, rats, dogs, or pigs. Such a testing method is well known to those skilled in the art. Furthermore, the doses of the drugs used in the treatment method of the present invention are generally known to those skilled in the art or can be appropriately determined by the aforementioned tests or the like.

[0219] The specific doses of the active ingredients to be administered in the method of treating a subject of the present invention described herein can be determined in consideration of various conditions about a subject in need of treatment, for example, the severity of the symptoms, the general health state of the subject, the age, the body weight, the sex of the subject, diet, the time and frequency of administration, a drug used in combination, response to the therapy, dosage form, and compliance to the therapy.

[0220] The administration route includes various routes including both oral and parenteral routes, for example, oral, intravenous, intramuscular, subcutaneous, local, intratumoral, rectal, intraarterial, intraportal, intraventricular, transmucosal, percutaneous, nasal, intraperitoneal, intrapulmonary, and intrauterine routes.

[0221] The frequency of administration differs depending on the properties of the agent or the composition used, and conditions about the subject including those described above, and may be, for example, multiple times per day (i.e., 2, 3, 4, or 5 times a day), once a day, every few days (i.e., every 2, 3, 4, 5, 6, or 7 days), once a week, or every few weeks (i.e., every 2, 3, or 4 weeks).

[0222] As used herein, the term “subject” means an arbitrary organism individual and is preferably an animal, more preferably a mammal, further preferably a human individual. In the present invention, the subject may be healthy or may have some disease. In the case of intending the treatment of a particular disease, the subject typically means a subject having this disease or having the risk of being affected by this disease.

[0223] As used herein, the term “treatment” includes every type of medically acceptable prophylactic and/or therapeutic intervention aimed at, for example, curing, temporarily ameliorating, or preventing a disease. For example, the term “treatment” encompasses various medically acceptable interventions of interest, including the delay or termination of the progression of a disease, the involution or disappearance of a lesion, the prevention of onset or the prevention of recurrence, etc.

[0224] Incidentally, as mentioned above, ATM, CDC25A, p21, PRKDC, RBBP8, SKP2, MCM10, RNPC1, CCNL1, CENPH, BRSK1, MYLK, MCM8, CCNB3, MCMDC1, AATF, AKT1, ALOX12, ANXA1, ANXA4, API5, ATF5, AVEN, AZU1, BAG1, BCL2L1, BFAR, CFLAR, IL2, MALT1, MCL1, MKL1, MPO, MTL5, MYBL2, MYO18A, MTOR, IRAK1, IRS1, MYD88, NFKB1, PIK3CG, RAC1, AKT3, EIF4B, EIF4E, ILK, MTCP1, PIK3CA and SRF are each a protein that exhibits synthetic lethality for a cancer cell when inhibited together with GST-π. Thus, a cell death-inducing agent and/or a cell growth-inhibiting agent for a cancer cell that is used together with a drug inhibiting GST-π can be screened for by using the inhibition of this homeostasis-related protein as an index. Specifically, a substance that can inhibit the homeostasis-related protein serves as a candidate substance for the cell death-inducing agent and/or the cell growth-inhibiting agent for a cancer cell that is used together with a drug inhibiting GST-π.

[0225] For example, a test substance is contacted with a cell expressing mutated KRAS as one example of the cancer cell, and the expression level of the homeostasis-related protein that exhibits synthetic lethality for the cell expressing mutated KRAS when inhibited together with GST-π is measured in the cell. The test substance can be selected as a candidate substance for a drug inhibiting the homeostasis-related protein, when the expression level measured after the contact of the test substance is decreased compared with the expression level measured in the absence of the test substance.

[0226] On the other hand, the drug inhibiting GST-π is a protein that exhibits synthetic lethality for a cancer cell when inhibited together with the drug inhibiting the homeostasis-related protein that exhibits synthetic lethality for a cancer cell when inhibited together with GST-π. Thus, a cell death-inducing agent and/or a cell growth-inhibiting agent for a cancer cell that is used together with a drug inhibiting the homeostasis-related protein can be screened for by using the inhibition of GST-π as an index. Specifically, a substance that can inhibit GST-π serves as a candidate substance for the cell death-inducing agent and/or the cell growth-inhibiting agent for a cancer cell that is used together with a drug inhibiting the homeostasis-related protein.

[0227] For example, a test substance is contacted with a cell expressing mutated KRAS as one example of the cancer cell, and the expression level of GST-π is measured in the cell. The test substance can be selected as a candidate substance for a drug inhibiting GST-π, when the expression level measured after the contact of the test substance is decreased compared with the expression level measured in the absence of the test substance.

[0228] Likewise, a cell death-inducing agent and/or a cell growth-inhibiting agent for a cancer cell can be screened for by using both of the inhibition of GST-π and the inhibition of the homeostasis-related protein that exhibits synthetic lethality for a cancer cell when inhibited together with GST-π as indexes. Specifically, a substance that can inhibit GST-π and can inhibit the homeostasis-related protein serves as a candidate substance for the cell death-inducing agent and/or the cell growth-inhibiting agent for a cancer cell.

[0229] For example, a test substance is contacted with a cell expressing mutated KRAS as one example of the cancer cell, and the expression level of GST-π and the expression level of the homeostasis-related protein are measured in the cell. The test substance can be selected as a candidate substance for a drug inhibiting GST-π and inhibiting the homeostasis-related protein that exhibits synthetic lethality for a cancer cell when inhibited together with GST-π, when these expression levels measured after the contact of the test substance are both decreased compared with the respective expression levels measured in the absence of the test substance.

[0230] In this context, the test substance is not limited by any means and can be any substance. The test substance may be a single substance or may be a mixture consisting of a plurality of components. The test substance may be configured to comprise an unidentified substance as in, for example, an extract from a microorganism or a culture solution, or may be configured to comprise known compositions at predetermined compositional ratios. Also, the test substance may be any of proteins, nucleic acids, lipids, polysaccharides, organic compounds, and inorganic compounds.

### EXAMPLES

[0231] Hereinafter, the present invention will be described further specifically with reference to Examples. However, the technical scope of the present invention is not intended to be limited by Examples below.

[Experiment 1] Knockdown of GST-π and P21 by siRNAs

[0232] As examples of cancer cells, 1×10⁵ M7609 cells (human colorectal cancer cells having KRAS mutation) and PANC-1 cells (human pancreatic cancer cells having KRAS mutation) were inoculated to 6 cm Petri dishes and cultured for 18 hours in Roswell Park Memorial Institute 1640 (RPMI 1640, Sigma-Aldrich Corp.) supplemented with 10% fetal bovine serum (FBS) and 0.5% L-glutamine. The culture conditions were 37° C. and 5% CO₂, unless otherwise specified. Moreover, as an example of cancer cells, 0.5×10⁵ A549 cells (human lung cancer cells having KRAS mutation) were inoculated to a 6 cm Petri dish and cultured for 18 hours in a Dulbecco's modified Eagle's medium (DMEM, Sigma-Aldrich Corp.) supplemented with 10% FBS and 1% L-glutamine. Furthermore, as an example of cancer cells, 1×10⁵ MIA PaCa-2 cells (human pancreatic cancer cell having KRAS mutation) were inoculated to a 6 cm Petri dish and cultured for 18 hours in DMEM supplemented with 10% FBS and 1% L-glutamine. Furthermore, as an example of cancer cells, 0.5×10⁵ HCT116 cells (human colorectal cancer cells having KRAS mutation) were inoculated to a 6 cm Petri dish and cultured for 18 hours in McCoy's 5A Medium (McCoy, Sigma-Aldrich Corp.) supplemented with 10% FBS and 0.5% L-glutamine.

[0233] In this experiment, first, the PANC-1, A549, or MIA PaCa-2 cells that became 20 to 30% confluent were transfected with GST-π siRNA and/or P21 siRNA using Lipofectamine RNAi MAX (Life Technologies Corp.) as follows.

[0234] The Lipofectamine/siRNA mixed solution for transfection was prepared as follows: first, a Lipofectamine solution in which 15 μL of Lipofectamine RNAi MAX and 485 μL of OPTI-MEM (Sigma-Aldrich Corp.) were mixed was prepared. Next, an siRNA solution in which a predetermined amount of 50 μM siRNA was adjusted to 500 μL with OPTI-MEM was prepared (e.g., in the case of preparing an siRNA solution used with a final concentration of 50 nM, 6 μL of 50 μM siRNA and 494 μL of OPTI-MEM were mixed), and this was mixed with the aforementioned Lipofectamine solution and left standing at room temperature for 15 minutes. siRNAs given below were used. In the description below, the upper-case letters represent RNAs, and the lower-case letters represent DNAs.

GST-π siRNA:
Sense strand:
(SEQ ID NO: 31)
GGGAGGCAAGACCUUCAUUtt
Antisense strand:
(SEQ ID NO: 32)
AAUGAAGGUCUUGCCUCCCtg
P21 siRNA:
Sense strand:
(SEQ ID NO: 33)
UCCUAAGAGUGCUGGGCAUtt
Antisense strand:
(SEQ ID NO: 34)
AUGCCCAGCACUCUUAGGAtt
Control siRNA:
Sense strand:
(SEQ ID NO: 35)
ACGUGACACGUUCGGAGAAtt
Antisense strand:
(SEQ ID NO: 36)
UUCUCCGAACGUGUCACGUtt
GST-π siRNA-2:
Sense strand:
(SEQ ID NO: 37)
UCUCCCUCAUCUACACCAAtt
Antisense strand:
(SEQ ID NO: 38)
UUGGUGUAGAUGAGGGAGAtg

[0235] GST-π siRNA and P21 siRNA each at a final concentration of 50 nM, GST-π siRNA or P21 siRNA at a final concentration of 50 nM (both added with control siRNA at a final concentration of 50 nM), or GST-π siRNA at a final concentration of 100 nM (without the addition of control siRNA) were added to each of the Petri dishes containing the PANC-1, MIA PaCa-2, or A549 cells. For a control used, control siRNA was added at a final concentration of 100 nM. After culture for 1 day without the replacement of the medium, the GST-π mRNA level and the P21 mRNA level were quantified by quantitative PCR using 7300 Real Time PCR System (Applied Biosystems, Inc.). The results are shown in FIG. 1. As shown in FIG. 1, it was revealed that the amount of P21 mRNA is increased by knocking down GST-π by the siRNA.

[0236] Moreover, as for the case where GST-π siRNA or control siRNA at a final concentration of 50 nM was added to each of the Petri dishes containing the A549 cells or the MIA PaCa-2 cells, the P21 mRNA level was similarly quantified every day from the day of addition of GST-π siRNA or control siRNA to the 4th day. The results are shown in FIG. 2. As shown in FIG. 2, it was revealed that the expression level of P21 mRNA is increased over time by knocking down GST-π by the siRNA.

[0237] Meanwhile, the influence of GST-π siRNA and/or P21 siRNA on the number of cells was tested. First, GST-π siRNA and P21 siRNA each at a final concentration of 50 nM, or GST-π siRNA or P21 siRNA at a final concentration of 50 nM (both added with control siRNA at a final concentration of 50 nM) were added to each of the Petri dishes containing the PANC-1, MIA PaCa-2, or A549 cells. For a control used, control siRNA was added at a final concentration of 100 nM. After culture for 5 days without the replacement of the medium, the cells were dissociated and collected from the Petri dish by trypsin treatment, and the number of cells was counted. The results are shown in FIG. 3. As shown in FIG. 3, it is evident that when GST-π and P21 are knocked down each alone using GST-π siRNA or P21 siRNA, the number of cells cannot be decreased with respect to the number of inoculated cells, though cell growth is inhibited. However, it is evident that when GST-π and P21 are both knocked down using GST-π siRNA and P21 siRNA, not only is growth inhibited but cell death can be induced in the PANC-1 cells and the MIA PaCa-2 cells expressing mutated KRAS.

[0238] From FIG. 3, it was considered, as to the A549 cells expressing mutated KRAS, that cell death was not induced by the treatment mentioned above. Accordingly, the number of transfections with GST-π siRNA and P21 siRNA was increased, and the influence of GST-π siRNA and/or P21 siRNA on the number of cells was tested as to the A549 cells and the HCT116 cells expressing mutated KRAS.

[0239] First, for the PANC-1 cells, the MIA PaCa-2 cells, or the HCT116 cells, GST-π siRNA and P21 siRNA each at a final concentration of 25 nM, or GST-π siRNA or P21 siRNA at a final concentration of 25 nM (all added with control siRNA at a final concentration of 25 nM) were added to each of the Petri dishes, while for the A549 cells, GST-π siRNA and P21 siRNA each at a final concentration of 50 nM, or GST-π siRNA or P21 siRNA at a final concentration of 50 nM (added with control siRNA at a final concentration of 50 nM) were added to each of the Petri dishes. For a control, control siRNA was added at a final concentration of 50 nM for the PANC-1 cells, the MIA PaCa-2 cells, or the HCT116 cells and at a final concentration of 100 nM for the A549 cells. After 2 days and after 4 days, the medium was replaced (RPMI 1640 supplemented with 10% FBS for the PANC-1 cells, DMEM supplemented with 10% FBS for the A549 cells and the MIA PaCa-2 cells, and McCoy supplemented with 10% FBS for the HCT116 cells). Again, GST-π siRNA or P21 siRNA was added at a final concentration of 25 nM (all added with control siRNA at a final concentration of 25 nM) for the PANC-1 cells, the MIA PaCa-2 cells, or the HCT116 cells, and at a final concentration of 50 nM (added with control siRNA at a final concentration of 50 nM) for the A549 cell to each of the Petri dishes. In this case as well, for a control, control siRNA was added at a final concentration of 50 nM for the PANC-1 cells or the MIA PaCa-2 cells and at a final concentration of 100 nM for the A549 cells. Then, the cells were cultured without the replacement of the medium. Seven days after the cell inoculation, the cells were dissociated and collected from the Petri dish by trypsin treatment, and the number of cells was counted. In this case, the phase difference images of the cells were also taken.

[0240] The results of measuring the number of cells for the A549 cells, the PANC-1 cells, and the MIA PaCa-2 cells are shown in FIG. 4. The results of measuring the number of cells for the HCT116 cells are shown in FIG. 5. Also, the phase difference image taken for the A549 cells is shown in FIG. 6. The phase difference image taken for the MIA PaCa-2 cells is shown in FIG. 7. The phase difference image taken for the PANC-1 cells is shown in FIG. 8. The phase difference image taken for the HCT116 cells is shown in FIG. 9.

[0241] As shown in FIGS. 4 and 5, when GST-π and P21 were both knocked down three times using GST-π siRNA and P21 siRNA, the number of the cancer cells (A549 cells, MIA PaCa-2 cells, PANC-1 cells, and HCT116 cells) expressing mutated KRAS is decreased 7 days after the cell inoculation with respect to the number of initially inoculated cells; thus it was revealed that cell death can be induced.

[0242] Moreover, as shown in FIGS. 6 to 9, the cells of each cell line (A549 cells, MIA PaCa-2 cells, PANC-1 cells, and HCT116 cells) expressing mutated KRAS in which GST-π was knocked down by GST-π siRNA became flat and large cells; thus it was able to be presumed that cell senescence was evoked. It was further revealed that when GST-π and P21 were both knocked down using GST-π siRNA and P21 siRNA, the cell senescence-like phenotype observed in the GST-π knockdown disappeared. From this result, it was considered that when GST-π and P21 were both knocked down using GST-π siRNA and P21 siRNA, the cell senescence evoked by the GST-π knockdown was inhibited by the P21 knockdown.

[0243] Whether the cell senescence as shown in FIGS. 6 to 9 was could be induced by knocking down GST-π was tested using the M7609 cells. First, GST-π siRNA was added at a final concentration of 30 nM to the Petri dish containing the M7609 cells. After 1 day and after 2 days, the medium was replaced (RPMI 1640 supplemented with 10% FBS). Again, GST-π siRNA was added at a final concentration of 30 nM to the Petri dish containing the M7609 cells. Then, the cells were cultured with the medium replaced every other day. Thirteen days after the cell inoculation, the cells were stained using Senescence (3-Galactosidase Staining Kit (Cell Signaling Technology, Inc.) according to the recommended protocol. A phase difference image was taken. The results are shown in FIG. 10. As shown in FIG. 10, the M7609 cells in which GST-π was knocked down became flat and large cells, and blue color development by (3-galactosidase was observed in the cells having such a phenotype; thus it is evident that cell senescence was evoked.

[0244] In addition, whether the cell death induced by knocking down both GST-π and P21 in the cancer cells expressing mutated KRAS was apoptosis was tested by measuring the expression level of an apoptosis-inducing factor PUMA gene.

[0245] First, GST-π siRNA and P21 siRNA each at a final concentration of 50 nM, or GST-π siRNA or P21 siRNA at a final concentration of 50 nM (both added with control siRNA at a final concentration of 50 nM) were added to each of the Petri dishes containing the A549 cells or the MIA PaCa-2 cells. For a control, control siRNA was added at a final concentration of 100 nM. After culture for 1 day without the replacement of the medium, the PUMA mRNA level was quantified by quantitative PCR using 7300 Real Time PCR System (Applied Biosystems, Inc.).

[0246] The results are shown in FIG. 11. As shown in FIG. 11, it was revealed that the mRNA level of the apoptosis-promoting factor PUMA is drastically increased by knocking down both GST-π and p21 using GST-π siRNA and P21 siRNA. From this result, it was revealed that the cell death induced by knocking down both GST-π and P21 is apoptosis.

[0247] Apoptosis-related protein groups are present in cells. The apoptosis-related proteins are broadly classified into two groups: an apoptosis-inhibiting protein group and an apoptosis-inducing protein group. The apoptosis-inhibiting protein group includes Bcl-2, Bcl-XL, Bcl-W, MCL-1, and Bcl-B. Also, the apoptosis-inducing protein group includes Bax, Bak, BOK, BIM, BID, BAD, NOXA, and PUMA. In general, the apoptosis-inhibiting proteins such as Bcl-2, Bcl-XL, and MCL-1 reside on mitochondrial outer membranes and inhibit the release of cytochrome C to inhibit apoptosis. On the other hand, the apoptosis-inducing protein groups such as Bax, BIM, BID, and BAD reside in cytoplasms, but translocate to mitochondrial outer membranes in response to death signals and promote the release of cytochrome C to induce apoptosis.

[0248] Also, upon activation due to DNA damage or the like, p53 promotes the transcription of Bax, NOXA, and PUMA to induce apoptosis. Particularly, PUMA is a protein that has been isolated as an apoptosis-inducing protein to be activated by p53. PUMA binds directly to Bcl-2, thereby inhibiting the apoptosis-inhibiting effect of Bcl-2 and inducing the apoptosis of the cell.

[0249] From these results of Experiment 1, it was shown that when a drug inhibiting GST-π and a drug inhibiting P21 are allowed to act on a cancer cell, cell growth can be drastically inhibited and further cell death can be strongly induced. Even if the drug inhibiting GST-π is allowed to act alone on a cancer cell, cell death cannot be induced, though cell growth can be inhibited. Even if the drug inhibiting P21 is allowed to act alone on the cell, cell growth can be inhibited merely slightly. Accordingly, it is a surprising effect that the cell death can be induced for a cancer cell by allowing both of these drugs to act thereon.

### [Experiment 2]

[0250] In Experiment 1, the synthetic lethality for cancer cells was demonstrated using GST-π siRNA and P21 siRNA. In this Experiment 2, a cell cycle-regulating protein that exhibited synthetic lethality by inhibition together with GST-π was screened for.

[0251] First, a MIA PaCa-2 cell suspension having a concentration of 1×10⁴ cells/mL was prepared with DMEM supplemented with 10% FBS and 1% L-glutamine, and this was inoculated at 100 μL/well to a 96-well plate and then cultured for 18 hours in DMEM supplemented with 10% FBS and 1% L-glutamine. The MIA PaCa-2 cells that became 20 to 30% confluent were transfected with GST-π siRNA-2 and/or siRNA against a target gene using Lipofectamine RNAi MAX as follows.

[0252] The Lipofectamine/siRNA mixed solution for transfection was prepared as follows: first, 51 μL of DNase free water (Ambion, Life Technologies Corp.) was added to 0.1 nmol of each siRNA contained in Human siGENOME siRNA Library—Cell Cycle Regulation—SMART pool (GE Healthcare Dharmacon Inc.) and left standing at room temperature for 90 minutes. An siRNA solution in which this aqueous siRNA solution was supplemented with 19.9 μL of OPTI-MEM was prepared (solution A). Next, a 50 μM aqueous GST-π siRNA-2 solution and a 50 μM aqueous control siRNA solution were each diluted with OPTI-MEM in ten times to prepare diluted solutions of 5 μM GST-π siRNA-2 and 5 μM control siRNA (solution B). 31.2 μL of the solution A and 8.8 μL of the solution B were mixed (solution C). Next, a Lipofectamine solution in which 150 μL of Lipofectamine RNAi MAX and 2.35 mL of OPTI-MEM were mixed was prepared (solution D). Next, 37.5 μL of the solution C and 37.5 μL of the solution D were mixed and left standing at room temperature for 15 minutes (solution E).

[0253] The solution E was added to each well culturing MIA-PaCa-2 cell of the 96-well plate at 10 μL/well. Separately, a 50 μM aqueous control siRNA solution (5.5 μL) and OPTI-MEM (189.5 μL) were mixed to prepare a solution (solution F). Next, a 50 μM aqueous control siRNA solution was diluted with OPTI-MEM in ten times to prepare 5 μM control siRNA (solution G). 31.2 μL of the solution F and 8.8 μL of the solution G were mixed (solution H). Next, a Lipofectamine solution in which 150 μL of Lipofectamine RNAi MAX and 2.35 mL of OPTI-MEM were mixed was prepared (solution I). Next, 37.5 μL of the solution H and 37.5 μL of the solution I were mixed and left standing at room temperature for 15 minutes (solution J). The solution J was added to each well culturing MIA-PaCa-2 cell of the 96-well plate at 10 μL/well. Then, the cells were cultured in DMEM supplemented with 10% FBS and 10% L-glutamine. After 5 days, a growth evaluation test was conducted using CyQUANT NF Cell Proliferation Assay Kit (Invitrogen Corp.).

[0254] First, 1×HBSS buffer was added to 22 μL of CyQUANT NF dye reagent to prepare a staining reaction solution for CyQUANT NF Cell proliferation Assay. The medium of the transfected cells mentioned above was aspirated, and 50 μL of the staining reaction solution was added thereto. The cells were left standing at 37° C. for 30 minutes. Then, a fluorescence wavelength of 520 nm was observed in excitation with an excitation wavelength of 480 nm.

[0255] The results are shown in FIG. 12. As a result of screening 170 types of genes encoding cell cycle-regulating proteins in terms of synthetic lethality with GST-π, ATM, as shown in FIG. 12, CDC25A, PRKDC, RBBP8, SKP2, MCM10, RNPC1, CCNL1, CENPH, BRSK1, MCM8, CCNB3, and MCMDC1 in addition to P21 demonstrated in Experiment 1 were able to be screened for as cell cycle-regulating proteins that exhibited synthetic lethality by inhibition together with GST-π. Among them, P21, RNPC1, CCNL1, MCM8, CCNB3, and MCMDC1 were able to be screened for as cell cycle-regulating proteins that inhibited cell growth merely slightly (rate of growth inhibition: less than 20%) when inhibited alone, but exhibited synthetic lethality only when inhibited together with GST-π. Accordingly, it can be concluded that a drug inhibiting a cell cycle-regulating protein selected from P21, RNPC1, CCNL1, MCM8, CCNB3, and MCMDC1 is very low toxic in itself and is excellent in safety.

### [Experiment 3]

[0256] In Experiment 2, a cell cycle-regulating protein that exhibited synthetic lethality by inhibition together with GST-π was screened for. In this Experiment 3, a protein having an anti-apoptotic function that exhibited synthetic lethality by inhibition together with GST-π was screened for.

[0257] First, a MIA PaCa-2 cell suspension having a concentration of 1×10⁴ cells/mL was prepared with DMEM supplemented with 10% FBS and 1% L-glutamine, and this was inoculated at 100 μL/well to a 96-well plate and then cultured for 18 hours in DMEM supplemented with 10% FBS and 1% L-glutamine. The MIA PaCa-2 cells that became 20 to 30% confluent were transfected with GST-π siRNA-2 and/or siRNA against a target gene using Lipofectamine RNAi MAX as follows.

[0258] The Lipofectamine/siRNA mixed solution for transfection was prepared as follows: first, 51 μL of DNase free water (Ambion, Life Technologies Corp.) was added to 0.1 nmol of each siRNA contained in a custom-siRNA Library, which contains uniquely-selected 140 types of genes considered to have an anti-apoptosis function (siGENOME SMART pool Cherry-pick Library, GE Healthcare Dharmacon Inc.) and left standing at room temperature for 90 minutes. An siRNA solution in which this aqueous siRNA solution was supplemented with 19.9 μL of OPTI-MEM was prepared (solution A). Next, a 50 μM aqueous GST-π siRNA-2 solution and a 50 μM aqueous control siRNA solution were each diluted with OPTI-MEM to prepare solutions of 5 μM GST-π siRNA-2 and 5 μM control siRNA (solution B). 31.2 μL of the solution A and 8.8 μL of the solution B were mixed (solution C). Next, a Lipofectamine solution in which 150 μL of Lipofectamine RNAi MAX and 2.35 mL of OPTI-MEM were mixed was prepared (solution D). Next, 37.5 μL of the solution C and 37.5 μL of the solution D were mixed and left standing at room temperature for 15 minutes (solution E). The solution E was added to each well culturing MIA-PaCa-2 cell of the 96-well plate at 10 μL/well.

[0259] Separately, a 50 μM aqueous control siRNA solution (5.5 μL) and OPTI-MEM (189.5 μL) were mixed to prepare a solution (solution F). Next, a 50 μM aqueous control siRNA solution was diluted with OPTI-MEM in ten times to prepare 5 μM control siRNA (solution G). 31.2 μL of the solution F and 8.8 μL of the solution G were mixed (solution H). Next, a Lipofectamine solution in which 150 μL of Lipofectamine RNAi MAX and 2.35 mL of OPTI-MEM were mixed was prepared (solution I). Next, 37.5 μL of the solution H and 37.5 μL of the solution I were mixed and left standing at room temperature for 15 minutes (solution J). The solution J was added to each well culturing MIA-PaCa-2 cell of the 96-well plate at 10 μL/well. Then, the cells were cultured in DMEM supplemented with 10% FBS and 1% L-glutamine. After 5 days, a growth evaluation test was conducted using CyQUANT NF Cell Proliferation Assay Kit (Invitrogen Corp.).

[0260] First, 11 mL of 1×HBSS buffer was added to 22 μL of CyQUANT NF dye reagent to prepare a staining reaction solution for CyQUANT NF Cell proliferation Assay. The medium of the transfected cells mentioned above was aspirated, and 50 μL of the staining reaction solution was added thereto. The cells were left standing at 37° C. for 30 minutes. Then, a fluorescence wavelength of 520 nm was observed in excitation with an excitation wavelength of 480 nm.

[0261] The results are shown in FIG. 13. As a result of screening 140 types of genes encoding anti-apoptosis-related proteins in terms of synthetic lethality with GST-π, as shown in FIG. 13, AATF, ALOX12, ANXA1, ANXA4, API5, ATF5, AVEN, AZU1, BAG1, BCL2L1, B FAR, CFLAR, IL2, MALT1, MCL1, MKL1, MPO, MTL5, MYB L2, and MYO18A were able to be screened for as anti-apoptosis-related proteins that exhibited synthetic lethality by inhibition together with GST-π.

### [Experiment 4]

[0262] In Experiment 2, a cell cycle-regulating protein that exhibited synthetic lethality by inhibition together with GST-π was screened for. In Experiment 3, a protein having an anti-apoptotic function that exhibited synthetic lethality by inhibition together with GST-π was screened for. In this Experiment 4, a PI3K signaling pathway-related protein that exhibited synthetic lethality by inhibition together with GST-π was screened for.

[0263] First, a MIA PaCa-2 cell suspension having a concentration of 1×10⁴ cells/mL was prepared with DMEM supplemented with 10% FBS and 1% L-glutamine, and this was inoculated at 100 μL/well to a 96-well plate and then cultured for 18 hours in DMEM supplemented with 10% FBS and 1% L-glutamine. The MIA PaCa-2 cells that became 20 to 30% confluent were transfected with GST-π siRNA-2 and/or siRNA against a target gene using Lipofectamine RNAi MAX as follows.

[0264] The Lipofectamine/siRNA mixed solution for transfection was prepared as follows: first, 51 μL of DNase free water (Ambion, Life Technologies Corp.) was added to 0.1 nmol of each siRNA contained in a custom-made siRNA library involving proprietary selected 80 types of genes thought to be involved in the PI3K signaling pathway (siGENOME SMARTpool Cherry-pick Library, GE Healthcare Dharmacon Inc.) and left standing at room temperature for 90 minutes. An siRNA solution in which this aqueous siRNA solution was supplemented with 19.9 μL of OPTI-MEM was prepared (solution A). Next, a 50 μM aqueous GST-π siRNA-2 solution and a 50 μM aqueous control siRNA solution were each diluted with OPTI-MEM in ten times to prepare diluted solutions of 5 μM GST-π siRNA-2 and 5 μM control siRNA (solution B). 31.2 μL of the solution A and 8.8 μL of the solution B were mixed (solution C). Next, a Lipofectamine solution in which 150 μL of Lipofectamine RNAi MAX and 2.35 mL of OPTI-MEM were mixed was prepared (solution D). Next, 37.5 μL of the solution C and 37.5 μL of the solution D were mixed and left standing at room temperature for 15 minutes (solution E). The solution E was added to each well culturing MIA-PaCa-2 cell of the 96-well plate at 10 μL/well.

[0265] Separately, a 50 μM aqueous control siRNA solution (5.5 μL) and OPTI-MEM (189.5 μL) were mixed to prepare a solution (solution F). Next, a 50 μM aqueous control siRNA solution was diluted with OPTI-MEM in ten times to prepare a diluted solution of 5 μM control siRNA (solution G). 31.2 μL of the solution F and 8.8 μL of the solution G were mixed (solution H). Next, a Lipofectamine solution in which 150 μL of Lipofectamine RNAi MAX and 2.35 mL of OPTI-MEM were mixed was prepared (solution I). Next, 37.5 μL of the solution H and 37.5 μL of the solution I were mixed and left standing at room temperature for 15 minutes (solution J). The solution J was added to each well culturing MIA-PaCa-2 cell of the 96-well plate at 10 μL/well to prepare a control. Then, the cells were cultured in DMEM supplemented with 10% FBS and 1% L-glutamine. After 5 days, a growth evaluation test was conducted using CyQUANT NF Cell Proliferation Assay Kit (Invitrogen Corp.).

[0266] First, 11 mL of 1×HBSS buffer was added to 22 μL of CyQUANT NF dye reagent to prepare a staining reaction solution for CyQUANT NF Cell proliferation Assay. The medium of the transfected cells mentioned above was aspirated, and 50 μL of the staining reaction solution was added thereto. The cells were left standing at 37° C. for 30 minutes. Then, a fluorescence wavelength of 520 nm was observed in excitation with an excitation wavelength of 480 nm.

[0267] The results are shown in FIG. 14. As a result of screening 80 types of genes encoding PI3K signaling pathway-related proteins in terms of synthetic lethality with GST-π, as shown in FIG. 14, MTOR, IRAK1, IRS1, MYD88, NFKB1, PIK3CG, RAC1, AKT3, EIF4B, EIF4E, ILK, MTCP1, PIK3CA, and SRF were able to be screened for as PI3K signaling pathway-related proteins that exhibited synthetic lethality by inhibition together with GST-π. Among them, MTOR, IRAK1, IRS1, MYD88, NFKB1, PIK3CG, and RAC1 were found to exhibit a significantly high cell growth-inhibiting effect when inhibited together with GST-π.

### [Experiment 5]

[0268] In this Experiment 5, a cell cycle-regulating protein MYLK (HEPATOLOGY, Vol. 44, No. 1, 2006, 152-163) was studied for its synthetic lethality against A549 cells (human lung cancer cells having KRAS mutation) when inhibited together with GST-π.

[0269] First, one day before transfection with siRNA, 0.25×10⁵ cells/well of the A549 cells were inoculated, together with 2.25 mL of DMEM (antibiotic-free) supplemented with 10% FBS, to each well. In this experiment, a 6-well plate was used, and each sample was tested in triplicate. The cultured A549 cells were transfected with GST-π siRNA-3 and/or MYLK siRNA (two types (MYLKa and MYLKb) were used) using Lipofectamine RNAi MAX as follows.

[0270] The Lipofectamine/siRNA mixed solution for transfection was prepared as follows: first, an siRNA solution in which a 50 nM GST-π siRNA-3 solution and a 50 nM MYLK siRNA solution (0.5 μL each) were mixed and supplemented with 124 μL of OPTI-MEM was prepared. As for a control siRNA solution, siRNA solutions were also prepared as to the combination of the control siRNA solution and the GST-π siRNA-3 solution and the combination of the control siRNA solution and the MYLK siRNA solution so as to have the same siRNA concentrations. Also, a Lipofectamine solution in which 7.5 μL of Lipofectamine RNAi MAX and 117.5 μL of OPTI-MEM were mixed was prepared. Then, each prepared siRNA solution and the Lipofectamine solution were mixed and left standing at room temperature for 5 minutes.

[0271] The obtained mixed solution was added dropwise to each well so that 2.5 mL thereof was finally contained in each well (final concentration of the siRNA: 20 nM). Then, the cells were cultured at 37° C. for 75 hours under 5% CO₂ conditions with mild shaking. After the completion of culture, a growth evaluation test was conducted in the same way as in Experiments 1 to 4. The results are shown in FIG. 15. As shown in FIG. 15, MYLK, a cell cycle-regulating protein, was found to exhibit synthetic lethality against cancer cells when inhibited together with GST-π. The results shown in FIG. 15 demonstrated that a GST-π-inhibiting drug and a MYLK-inhibiting drug exhibited a cell growth-inhibiting effect merely slightly when allowed to act each alone on cancer cells, whereas the GST-π-inhibiting drug and the MYLK-inhibiting drug were able to inhibit cell growth very strongly when allowed to act together on cancer cells.

[0272] siRNAs given below were used. In the description below, the upper-case letters represent RNAs, and the lower-case letters represent DNAs.

GST-π siRNA-3:
Sense strand:
(SEQ ID NO: 109)
CCUUUUGAGACCCUGCUGUtt
Antisense strand:
(SEQ ID NO: 110)
ACAGCAGGGUCUCAAAAGGtt
MYLKa:
Sense strand:
(SEQ ID NO: 111)
CUGGGGAAGAAGGUGAGUAtt
Antisense strand:
(SEQ ID NO: 112)
UACUCACCUUCUUCCCCAGtt
MYLKb:
Sense strand:
(SEQ ID NO: 113)
CAAGAUAGCCAGAGUUUAAtt
Antisense strand:
(SEQ ID NO: 114)
UUAAACUCUGGCUAUCUUGtt

1. A cell death-inducing agent for a cancer cell comprising, as active ingredients, a drug inhibiting GST-π and a drug inhibiting a homeostasis-related protein that exhibits synthetic lethality when inhibited together with GST-π.

2. A cell growth-inhibiting agent for a cancer cell comprising, as active ingredients, a drug inhibiting GST-π and a drug inhibiting a homeostasis-related protein that exhibits synthetic lethality when inhibited together with GST-π.

3. The agent according to claim 1, wherein the homeostasis-related protein that exhibits synthetic lethality along with the inhibition of GST-π is a protein selected from the group consisting of a cell cycle-regulating protein, an anti-apoptosis-related protein, and a PI3K signaling pathway-related protein.

4. The agent according to claim 3, wherein the cell cycle-regulating protein that exhibits synthetic lethality along with the inhibition of GST-π is at least one cell cycle-regulating protein selected from the group consisting of ATM, CDC25A, p21, PRKDC, RBBP8, SKP2, MCM10, RNPC1, CCNL1, CENPH, BRSK1, MCM8, CCNB3, MCMDC1 and MYLK.

5. The agent according to claim 3, wherein the cell cycle-regulating protein that exhibits synthetic lethality along with the inhibition of GST-π is at least one protein selected from the group consisting of p21, RNPC1, CCNL1, MCM8, CCNB3, and MCMDC1.

6. The agent according to claim 3, wherein the anti-apoptosis-related protein that exhibits synthetic lethality along with the inhibition of GST-π is at least one anti-apoptosis-related protein selected from the group consisting of AATF, ALOX12, ANXA1, ANXA4, API5, ATF5, AVEN, AZU1, BAG1, BCL2L1, BFAR, CFLAR, IL2, MALT1, MCL1, MKL1, MPO, MTL5, MYBL2, and MYO18A.

7. The agent according to claim 3, wherein the PI3K signaling pathway-related protein that exhibits synthetic lethality along with the inhibition of GST-π is at least one PI3K signaling pathway-related protein selected from the group consisting of MTOR, IRAK1, IRS1, MYD88, NFKB1, PIK3CG, RAC1, AKT3, EIF4B, EIF4E, ILK, MTCP1, PIK3CA, and SRF.

8. The agent according to claim 1, wherein the drug is a substance selected from the group consisting of an RNAi molecule, a ribozyme, an antisense nucleic acid, a DNA/RNA chimeric polynucleotide, and a vector for expressing at least one of them.

9. The agent according to claim 1, wherein the drug inhibiting a homeostasis-related protein is a compound that acts on the homeostasis-related protein.

10. The agent according to claim 1, wherein the agent induces apoptosis.

11. The agent according to claim 1 or 2, wherein the cancer cell is a cancer cell highly expressing GST-π.

12. A pharmaceutical composition for the treatment of a disease caused by abnormal cell growth, comprising an agent according to claim 1.

13. The pharmaceutical composition according to claim 12, wherein the disease is a cancer.

14. The pharmaceutical composition according to claim 13, wherein the cancer is a cancer highly expressing GST-π.

15. A method for screening for a cell death-inducing agent and/or a cell growth-inhibiting agent for a cancer cell that is used together with a drug inhibiting GST-π, comprising a step of selecting a drug inhibiting a homeostasis-related protein that exhibits synthetic lethality when inhibited together with GST-π.

16. The screening method according to claim 15, comprising the steps of: contacting a test substance with a cancer cell; measuring the expression level of the homeostasis-related protein in the cell; and selecting the test substance as a drug inhibiting the homeostasis-related protein when the expression level is decreased compared with that measured in the absence of the test substance.

17. The screening method according to claim 15, wherein the homeostasis-related protein that exhibits synthetic lethality along with the inhibition of GST-π is a protein selected from the group consisting of a cell cycle-regulating protein, an anti-apoptosis-related protein, and a PI3K signaling pathway-related protein.

18. The screening method according to claim 17, wherein the cell cycle-regulating protein that exhibits synthetic lethality along with the inhibition of GST-π is at least one cell cycle-regulating protein selected from the group consisting of ATM, CDC25A, p21, PRKDC, RBBP8, SKP2, MCM10, RNPC1, CCNL1, CENPH, BRSK1, MCM8, CCNB3, MCMDC1 and MYLK.

19. The screening method according to claim 17, wherein the cell cycle-regulating protein that exhibits synthetic lethality along with the inhibition of GST-π is at least one protein selected from the group consisting of p21, RNPC1, CCNL1, MCM8, CCNB3, and MCMDC1.

20. The screening method according to claim 17, wherein the anti-apoptosis-related protein that exhibits synthetic lethality along with the inhibition of GST-π is at least one anti-apoptosis-related protein selected from the group consisting of AATF, ALOX12, ANXA1, ANXA4, API5, ATF5, AVEN, AZU1, BAG1, BCL2L1, BFAR, CFLAR, IL2, MALT1, MCL1, MKL1, MPO, MTL5, MYBL2, and MYO18A.

21. The screening method according to claim 16, wherein the PI3K signaling pathway-related protein that exhibits synthetic lethality along with the inhibition of GST-π is at least one PI3K signaling pathway-related protein selected from the group consisting of MTOR, IRAK1, IRS1, MYD88, NFKB1, PIK3CG, RAC1, AKT3, EIF4B, EIF4E, ILK, MTCP1, PIK3CA, and SRF.

The application's sequence listing, which the Patent Office published only in electronic form, follows.

SEQUENCE LISTING (114 sequences)

SEQ ID NO: 1 - DNA, 986 bp, Homo sapiens
  CDS (250)..(882)
tgggaaagagggaaaggcttccccggccagctgcgcggcgactccggggactccagggcgcccctctgcggccgacgcccggggtgcagcggccgccggggctggggccggcgggagtccgcgggaccctccagaagagcggccggcgccgtgactcagcactggggcggagcggggcgggaccacccttataaggctcggaggccgcgaggccttcgctggagtttcgccgccgcagtcttcgccaccatgccgccctacaccgtggtctatttcccagttcgaggccgctgcgcggccctgcgcatgctgctggcagatcagggccagagctggaaggaggaggtggtgaccgtggagacgtggcaggagggctcactcaaagcctcctgcctatacgggcagctccccaagttccaggacggagacctcaccctgtaccagtccaataccatcctgcgtcacctgggccgcacccttgggctctatgggaaggaccagcaggaggcagccctggtggacatggtgaatgacggcgtggaggacctccgctgcaaatacatctccctcatctacaccaactatgaggcgggcaaggatgactatgtgaaggcactgcccgggcaactgaagccttttgagaccctgctgtcccagaaccagggaggcaagaccttcattgtgggagaccagatctccttcgctgactacaacctgctggacttgctgctgatccatgaggtcctagcccctggctgcctggatgcgttccccctgctctcagcatatgtggggcgcctcagtgcccggcccaagctcaaggccttcctggcctcccctgagtacgtgaacctccccatcaatggcaacgggaaacagtgagggttggggggactctgagcgggaggcagagtttgccttcctttctccaggaccaataaaatttctaagagagctaaaaaaaaaaaaaaaaaaaaaaaaaaaaa

SEQ ID NO: 2 - protein, 210 aa, Homo sapiens
MPPYTVVYFPVRGRCAALRMLLADQGQSWKEEVVTVETWQEGSLKASCLYGQLPKFQDGDLTLYQSNTILRHLGRTLGLYGKDQQEAALVDMVNDGVEDLRCKYISLIYTNYEAGKDDYVKALPGQLKPFETLLSQNQGGKTFIVGDQISFADYNLLDLLLIHEVLAPGCLDAFPLLSAYVGRLSARPKLKAFLASPEYVNLPINGNGKQ

SEQ ID NO: 3 - DNA, 2175 bp, Homo sapiens
  CDS (126)..(620)
gttgtatatcagggccgcgctgagctgcgccagctgaggtgtgagcagctgccgaagtcagttccttgtggagccggagctgggcgcggattcgccgaggcaccgaggcactcagaggaggcgccatgtcagaaccggctggggatgtccgtcagaacccatgcggcagcaaggcctgccgccgcctcttcggcccagtggacagcgagcagctgagccgcgactgtgatgcgctaatggcgggctgcatccaggaggcccgtgagcgatggaacttcgactttgtcaccgagacaccactggagggtgacttcgcctgggagcgtgtgcggggccttggcctgcccaagctctaccttcccacggggccccggcgaggccgggatgagttgggaggaggcaggcggcctggcacctcacctgctctgctgcaggggacagcagaggaagaccatgtggacctgtcactgtcttgtacccttgtgcctcgctcaggggagcaggctgaagggtccccaggtggacctggagactctcagggtcgaaaacggcggcagaccagcatgacagatttctaccactccaaacgccggctgatcttctccaagaggaagccctaatccgcccacaggaagcctgcagtcctggaagcgcgagggcctcaaaggcccgctctacatcttctgccttagtctcagtttgtgtgtcttaattattatttgtgttttaatttaaacacctcctcatgtacataccctggccgccccctgccccccagcctctggcattagaattatttaaacaaaaactaggcggttgaatgagaggttcctaagagtgctgggcatttttattttatgaaatactatttaaagcctcctcatcccgtgttctccttttcctctctcccggaggttgggtgggccggcttcatgccagctacttcctcctccccacttgtccgctgggtggtaccctctggaggggtgtggctccttcccatcgctgtcacaggcggttatgaaattcaccccctttcctggacactcagacctgaattctttttcatttgagaagtaaacagatggcactttgaaggggcctcaccgagtgggggcatcatcaaaaactttggagtcccctcacctcctctaaggttgggcagggtgaccctgaagtgagcacagcctagggctgagctggggacctggtaccctcctggctcttgatacccccctctgtcttgtgaaggcagggggaaggtggggtcctggagcagaccaccccgcctgccctcatggcccctctgacctgcactggggagcccgtctcagtgttgagccttttccctctttggctcccctgtaccttttgaggagccccagctacccttcttctccagctgggctctgcaattcccctctgctgctgtccctcccccttgtcctttcccttcagtaccctctcagctccaggtggctctgaggtgcctgtcccacccccacccccagctcaatggactggaaggggaagggacacacaagaagaagggcaccctagttctacctcaggcagctcaagcagcgaccgccccctcctctagctgtgggggtgagggtcccatgtggtggcacaggcccccttgagtggggttatctctgtgttaggggtatatgatgggggagtagatctttctaggagggagacactggcccctcaaatcgtccagcgaccttcctcatccaccccatccctccccagttcattgcactttgattagcagcggaacaaggagtcagacattttaagatggtggcagtagaggctatggacagggcatgccacgtgggctcatatggggctgggagtagttgtctttcctggcactaacgttgagcccctggaggcactgaagtgcttagtgtacttggagtattggggtctgaccccaaacaccttccagctcctgtaacatactggcctggactgttttctctcggctccccatgtgtcctggttcccgtttctccacctagactgtaaacctctcgagggcagggaccacaccctgtactgttctgtgtctttcacagctcctcccacaatgctgaatatacagcaggtgctcaataaatgattcttagtgactttacttgtaaaaaaaaaaaaaaaaaa

SEQ ID NO: 4 - protein, 164 aa, Homo sapiens
MSEPAGDVRQNPCGSKACRRLFGPVDSEQLSRDCDALMAGCIQEARERWNFDFVTETPLEGDFAWERVRGLGLPKLYLPTGPRRGRDELGGGRRPGTSPALLQGTAEEDHVDLSLSCTLVPRSGEQAEGSPGGPGDSQGRKRRQTSMTDFYHSKRRLIFSKRKP

SEQ ID NO: 5 - DNA, 2410 bp, Homo sapiens
  CDS (185)..(904)
agagtccccgcagcgccggtcgggagcgcagcgcggcgcagctcggcgcgcacggcgggagcggcgcgcgagtggtcgggcctggcggctggacgggcgcccctcgctgccccgcgcgctccccgccgccccccatgagcgcagccccgcgcggcccgggtccgtaggcggcggggcgccccccatgctgctgcagcccgcgccgtgcgccccgagcgcgggcttcccgcggcccctggccgcccccggcgccatgcacggctcgcagaaggacaccacgttcaccaagatcttcgtgggcggcctgccgtaccacactaccgacgcctcgctcaggaagtacttcgagggcttcggcgacatcgaggaggccgtggtcatcaccgaccgccagacgggcaagtcccgcggctacggcttcgtgaccatggccgaccgggcggcagctgagagggcttgcaaagacccgaaccccatcatcgacggccgcaaggccaacgtgaacctggcatatctgggcgccaagccgcggagcctccagacgggctttgccattggggtgcagcagctgcaccccaccttgatccagcggacttacgggctgaccccgcactacatctacccaccagccatcgtgcagcccagcgtggtgatcccagccgcccctgtcccgtcgctgtcctcgccctacattgagtacacgccggccagcccggcctacgcccagtacccaccggccacctatgaccagtacccatacgccgcctcgcctgccacggctgccagcttcgtgggctacagctaccctgccgccgtgccccaggccctctcagccgcagcacccgcgggcaccactttcgtgcagtaccaggcgccgcagctgcagcctgacaggatgcagtgaggggcgttcctgccccgaggactgtggcattgtcaccttcacagcagacagagctgccaggccatgatgggctggcgacagcccggctgagcttcagtgaggtgccaccagcacccgtgcctccgaagaccgctcgggcattccgcctgcgccctgggacagcggagagacggcttctctttaatctaggtcccattgtgtcttgagggaggactttaagaatgactgagaactatttaaagacgcaatcccaggttccttgcacaccatggcagcctctccttgcaccttctcctgcctctccacactccaggttccctcaggcttgtgtccccactgctgcatcgtggcggggtgtcacagaccctctgcagcccctggctgccctggactgtgcagagatgcctgactccagggaaacctgaaagcaagaagttaatggactgtttattgtaacttgatcctcccgagctgtgagcgcagtctgaggtgtgaggacacggcctcctgttggagtcccattttctccatcagggcacgtgggcggcttcctcaagcccggaggagctcccaggcgcacaggggccgccggtaacaggggccgccggccaaaggcccctttccagtcatagcactgaagttgcaacttttttcttgtaattgttttgctactaagataatttcagaagttcagtctattttttcagcggatactgccgccaccaagaatccaaaacctatttttgacttggagagacttgcttttgttggttccgcccgtggagacgacgatagtgtttctgtataataaagtgtctgccggctcgcgggccaggatcctctcggtgggatgggcaccacagacaggaggcccctcaggcccgtgcgggccactgtctgctgccgcctgccggggtggcagagtgagttgtctcaggaccccgtcactgcgacgttgacactcctctcccttcccttcctccccaactccccaaacactgtggaaggggagaaggaagtgatccacagcattcaggccacttggggtctagaccatggtggtgccagcctggggggggcagtggccctcagctctgcccgctggagcggttgagtgcagaagggtgcgcctcttccctctacccccgcaccacctgctgtgtgccagcctgagacggttcctgcctgtcttgggggttggtggagggtggaggcagttctgccagccgtggcagggctgctatggggcatccagggctgtgggggtctggaggaggggacatgaggtgagaggtatcctggccgagggcggggggcagcggggggtctccctccggacctacctcagggagctgagcgtgcaggcgctccagggcaggcctgggacagagtcaaggctcagagaataaaggtagctaatctcatcataatatttttattagaatgttctgatgataaaaataaaacttgttttctttaaagaaaaaaaaaaaaaaaaaaaaaaaa

SEQ ID NO: 6 - protein, 239 aa, Homo sapiens
MLLQPAPCAPSAGFPRPLAAPGAMHGSQKDTTFTKIFVGGLPYHTTDASLRKYFEGFGDIEEAVVITDRQTGKSRGYGFVTMADRAAAERACKDPNPIIDGRKANVNLAYLGAKPRSLQTGFAIGVQQLHPTLIQRTYGLTPHYIYPPAIVQPSVVIPAAPVPSLSSPYIEYTPASPAYAQYPPATYDQYPYAASPATAASFVGYSYPAAVPQALSAAAPAGTTFVQYQAPQLQPDRMQ

SEQ ID NO: 7 - DNA, 2625 bp, Homo sapiens
  CDS (600)..(2180)
atagggtccacagccttgtgttcttcaaatactgtaaagcagccctctccagattccttgagggtcactttatattacacattcgtccacacaggacaacaaagtcaccacttccacccgccaaagcgcgctcaggtcggccgccacttcccttggtacacgcggaacgcaagccgcgccgaggctaaaggaagaggccggaatgcagggcgaaggggcgcagagatgctagccaatgctgccacctctattttggatataagggatcttgtaaagctccgttattcgtgtggctatcacaaacaaggtggtttcgaccggccttggctagagaaggcctcctcagcctctgaggatcccaaggtctgtcgcagcacccaacactcccctcgcaggcccagatgccgagggcggaggcgcggcctggagggactagttggcgcgcggctgcccggcgtggtgacgtcagggcggaagcgcacgcggcgtgaagcggcccagaacccggcggtcacgggaatatccgtcgcgccgagaacgctggttagtcttgtttcgggttccggctgcgttgggcttgcgtgcggctcgctaagactatggcgtccgggcctcattcgacagctactgctgccgcagccgcctcatcggccgccccaagcgcgggcggctccagctccgggacgacgaccacgacgacgaccacgacgggagggatcctgatcggcgatcgcctgtactcggaagtttcacttaccatcgaccactctctgattccggaggagaggctctcgcccaccccatccatgcaggatgggctcgacctgcccagtgagacggacttacgcatcctgggctgcgagctcatccaggccgccggcattctcctccggctgccgcaggtggcgatggcaacggggcaggtgttgtttcatcgttttttctactccaaatctttcgtcaaacacagtttcgagattgttgctatggcttgtattaatcttgcatcaaaaatcgaagaagcacctagaagaataagagatgtgattaatgtattccaccacctccgccagttaagaggaaaaaggactccaagccccctgatccttgatcagaactacattaacaccaaaaatcaagttatcaaagcagagaggagggtgctaaaggagttgggattttgtgttcatgtcaagcatcctcataagatcattgttatgtatttacaagtcttagaatgtgaacgtaatcaaaccctggttcaaactgcctggaattacatgaatgacagtcttcgaaccaatgtgtttgttcgatttcaaccagagactatagcatgtgcttgcatctaccttgcagctagagcacttcagattccgttgccaactcgtccccattggtttcttctttttggtactacagaagaggaaatccaggaaatctgcatagaaacacttaggctttataccagaaaaaagccaaactatgaattactggaaaaagaagtagaaaaaagaaaagtagccttacaagaagccaaattaaaagcaaagggattgaatccggatggaactccagccctttcaaccctgggtggattttctccagcctccaagccatcatcaccaagagaagtaaaagctgaagagaaatcaccaatctccattaatgtgaagacagtcaaaaaagaacctgaggatagacaacaggcttccaaaagcccttacaatggtgtaagaaaagacagcaagagaagtagaaatagcagaagtgcaagtcgatcgaggtcaagaacacgatcacgttctagatcacatactccaagaagacactataataataggcggagtcgatctggaacatacagctcgagatcaagaagcaggtcccgcagtcacagtgaaagccctcgaagacatcataatcatggttctcctcaccttaaggccaagcataccagagatgatttaaaaagttcaaacagacatggtcataaaaggaaaaaatctcgttctcgatctcagagcaagtctcgggatcactcagatgcagccaagaaacacaggcatgaaaggggacatcatagggacaggcgtgaacgatctcgctcctttgagaggtcccataaaagcaagcaccatggtggcagtcgctcaggacatggcaggcacaggcgctgactttctcttcctttgagcctgcatcagttcttggttttgcctatctacagtgtgatgtatggactcaatcaaaaacattaaacgcaaactgattaggatttgatttcttgaaaccctctaggtctctagaacactgaggacagtttcttttgaaaagaactatgttaatttttttgcacattaaaatgccctagcagtatctaattaaaaaccatggtcaggttcaattgtactttattatagttgtgtattgtttattgctataagaactggagcgtgaattctgtaaaaatgtatcttatttttatacagataaaattgcagacactgttctatttaagtggttatttgtttaaatgatggtgaatactttcttaacactggtttgtctgcatgtgtaaagatttttacaaggaaataaaatacaaatcttgttttttctaaa

SEQ ID NO: 8 - protein, 526 aa, Homo sapiens
MASGPHSTATAAAAASSAAPSAGGSSSGTTTTTTTTTGGILIGDRLYSEVSLTIDHSLIPEERLSPTPSMQDGLDLPSETDLRILGCELIQAAGILLRLPQVAMATGQVLFHRFFYSKSFVKHSFEIVAMACINLASKIEEAPRRIRDVINVFHHLRQLRGKRTPSPLILDQNYINTKNQVIKAERRVLKELGFCVHVKHPHKIIVMYLQVLECERNQTLVQTAWNYMNDSLRTNVFVRFQPETIACACIYLAARALQIPLPTRPHWFLLFGTTEEEIQEICIETLRLYTRKKPNYELLEKEVEKRKVALQEAKLKAKGLNPDGTPALSTLGGFSPASKPSSPREVKAEEKSPISINVKTVKKEPEDRQQASKSPYNGVRKDSKRSRNSRSASRSRSRTRSRSRSHTPRRHYNNRRSRSGTYSSRSRSRSRSHSESPRRHHNHGSPHLKAKHTRDDLKSSNRHGHKRKKSRSRSQSKSRDHSDAAKKHRHERGHHRDRRERSRSFERSHKSKHHGGSRSGHGRHRR

SEQ ID NO: 9 - DNA, 3715 bp, Homo sapiens
  CDS (378)..(2900)
ctttgagcggaagttggatcactgaagcgccaaaaaagaatttaggggaagacctgattttcgcttgaggcatttttgcggcgctgtgcgctacagacaccttctggaagctgcggtggggaaactgagtttcccgagccgttgagacagatggggttcagcaccgcgcggggacgacaggaaagctgcggctgaagagaactgcggacttggcaggagtcgcctgaggagctaagatcccggagactcttagccccgtggtgcttctctacgggagggagggagggagaatccggccggacagatctgcgcgtatcctggagccggcccagttgtgaactaggagagctttgggacctctgtcccaagcaagagagatgaatggagagtatagaggcagaggatttggacgaggaagatttcaaagctggaaaaggggaagaggtggtgggaacttctcaggaaaatggagagaaagagaacacagacctgatctgagtaaaaccacaggaaaacgtacttctgaacaaaccccacagtttttgctttcaacaaagaccccacagtcaatgcagtcaacattggatcgattcataccatataaaggctggaagctttatttctctgaagtttacagcgatagctctcctttgattgagaagattcaagcatttgaaaaatttttcacaaggcatattgatttgtatgacaaggatgaaatagaaagaaagggaagtattttggtagattttaaagaactgacagaaggtggtgaagtaactaacttgataccagatatagcaactgaactaagagatgcacctgagaaaaccttggcttgcatgggtttggcaatacatcaggtgttaactaaggaccttgaaaggcatgcagctgagttacaagcccaggaaggattgtctaatgatggagaaacaatggtaaatgtgccacatattcatgcaagggtgtacaactatgagcctttgacacagctcaagaatgtcagagcaaattactatggaaaatacattgctctaagagggacagtggttcgtgtcagtaatataaagcctctttgcaccaagatggcttttctttgtgctgcatgtggagaaattcagagctttcctcttccagatggaaaatacagtcttcccacaaagtgtcctgtgcctgtgtgtcgaggcaggtcatttactgctctccgcagctctcctctcacagttacgatggactggcagtcaatcaaaatccaggaattgatgtctgatgatcagagagaagcaggtcggattccacgaacaatagaatgtgagcttgttcatgatcttgtggatagctgtgtcccgggagacacagtgactattactggaattgtcaaagtctcaaatgcggaagaaggttctcgaaataagaatgacaagtgtatgttccttttgtatattgaagcaaattctattagtaatagcaaaggacagaaaacaaagagttctgaggatgggtgtaagcatggaatgttgatggagttctcacttaaagacctttatgccatccaagagattcaagctgaagaaaacctgtttaaactcattgtcaactcgctttgccctgtcatttttggtcatgaacttgttaaagcaggtttggcattagcactctttggaggaagccagaaatacgcagatgacaaaaacagaattccaattcggggagacccccacatccttgttgttggagatccaggcctaggaaaaagtcaaatgctacaggcagcgtgcaatgttgccccacgtggcgtgtatgtttgtggtaacaccacgaccacctctggtctgacggtaactctttcaaaagatagttcctctggagattttgctttggaagctggtgccctggtacttggtgatcaaggtatttgtggaatcgatgaatttgataagatggggaatcaacatcaagccttgttggaagccatggagcagcaaagtattagtcttgctaaggctggtgtggtttgtagccttcctgcaagaacttccattattgctgctgcaaatccagttggaggacattacaataaagccaaaacagtttctgagaatttaaaaatggggagtgcactactatccagatttgatttggtctttatcctgttagatactccaaatgagcatcatgatcacttactctctgaacatgtgattgcaataagagctggaaagcagagaaccattagcagtgccacagtagctcgtatgaatagtcaagattcaaatacttccgtacttgaagtagtttctgagaagccattatcagaaagactaaaggtggttcctggagaaacaatagatcccattccccaccagctattgagaaagtacattggctatgctcggcagtatgtgtacccaaggctatccacagaagctgctcgagttcttcaagatttttaccttgagctccggaaacagagccagaggttaaatagctcaccaatcactaccaggcagctggaatctttgattcgtctgacagaggcacgagcaaggttggaattgagagaggaagcaaccaaagaagacgctgaggatatagtggaaattatgaaatatagcatgctaggaacttactctgatgaatttgggaacctagattttgagcgatcccagcatggttctggaatgagcaacaggtcaacagcgaaaagatttatttctgctctcaacaacgttgctgaaagaacttataataatatatttcaatttcatcaacttcggcagattgccaaagaactaaacattcaggttgctgattttgaaaattttattggatcactaaatgaccagggttacctcttgaaaaaaggcccaaaagtttaccagcttcaaactatgtaaaaggacttcaccaagttagggcctcctgggtttattgcagattaaagccatctcagtgaagatatgcgtgcacgcacagacagacagacacacacacacacacacacacacacacacacacacacacacacagtcaaatactgttctctgaaaaatgatgtcccaaaagtattataataggaaaaaagcattaaatataataaactaatttaagaagtgataaagtctccagatgcagtagctcacactgtaatcacagtgactcaggaggctgaggtgagaggattccttgaggccagggttcgagaccaaccttgggcaacatagcaagaccccatttcttaaaaaaaaaaaaaaaaaatttaaacttagctgggtatggtggcacatgcctatagtctcagctacttgtgaggctgaggcaggaggattctttgagcccaggagtttgaggttacagtgagccacaatcacaccaatcactgcactccagcctgggcaataaagtaactcttgactcaaaaaaataaaaaaaattgtagtggtagccatgtgttaattgttaaataaattctccaaagggctaaaagtaaattacttataaattttttatagttgtatttttgacctgccttttatatgtatgaatatttcatagttttgcatatcagatgtaggcatacagacaaatacataaaccaatgaatatattacatattctgtgttccaataaaactttatttatggacactaaaatttgaatttcataaaattttcccatgtcaagaatacaaaatacttgagttttgttttta

SEQ ID NO: 10 - protein, 840 aa, Homo sapiens
MNGEYRGRGFGRGRFQSWKRGRGGGNFSGKWREREHRPDLSKTTGKRTSEQTPQFLLSTKTPQSMQSTLDRFIPYKGWKLYFSEVYSDSSPLIEKIQAFEKFFTRHIDLYDKDEIERKGSILVDFKELTEGGEVTNLIPDIATELRDAPEKTLACMGLAIHQVLTKDLERHAAELQAQEGLSNDGETMVNVPHIHARVYNYEPLTQLKNVRANYYGKYIALRGTVVRVSNIKPLCTKMAFLCAACGEIQSFPLPDGKYSLPTKCPVPVCRGRSFTALRSSPLTVTMDWQSIKIQELMSDDQREAGRIPRTIECELVHDLVDSCVPGDTVTITGIVKVSNAEEGSRNKNDKCMFLLYIEANSISNSKGQKTKSSEDGCKHGMLMEFSLKDLYAIQEIQAEENLFKLIVNSLCPVIFGHELVKAGLALALFGGSQKYADDKNRIPIRGDPHILVVGDPGLGKSQMLQAACNVAPRGVYVCGNTTTTSGLTVTLSKDSSSGDFALEAGALVLGDQGICGIDEFDKMGNQHQALLEAMEQQSISLAKAGVVCSLPARTSIIAAANPVGGHYNKAKTVSENLKMGSALLSRFDLVFILLDTPNEHHDHLLSEHVIAIRAGKQRTISSATVARMNSQDSNTSVLEVVSEKPLSERLKVVPGETIDPIPHQLLRKYIGYARQYVYPRLSTEAARVLQDFYLELRKQSQRLNSSPITTRQLESLIRLTEARARLELREEATKEDAEDIVEIMKYSMLGTYSDEFGNLDFERSQHGSGMSNRSTAKRFISALNNVAERTYNNIFQFHQLRQIAKELNIQVADFENFIGSLNDQGYLLKKGPKVYQLQTM

SEQ ID NO: 11 - DNA, 1212 bp, Homo sapiens
  CDS (115)..(990)
aggtgtctggaactggattacagtttcttctgattgaacgcagcctttgaatactgcctggcctatcgcgaatacatccctgccttggacaagacgcagctgaatctctaagtgatgctactgccactaccaccccagagctccaaacctgtgcctaagaaatctcagtccagcaaaattgtgcccagtcatcatgacccatctgaaaagacgggggagaattgccaaacgaagatatctccatcttcacttcaggagtctccatcttcacttcagggagcactcaaaaagagatcagcttttgaagatctcactaatgtgtcctttgagatgacccatgagaccctgtacttggcagtgaagctggtggatctctacctaatgaaggcagtatgcaagaaggataagttacaactccttggtgccactgcctttatgattgcagcaaaatttgaggagcacaactcacctcgtgtggatgactttgtgtacatctgtgatgataattatcagcgatctgaggtactcagcatggaaatcaacatcctgaacgtcctcaaatgtgacattaacattcccatcgcctaccattttctgcgcagatatgctaggtgtatccacaccaacatgaagacactgaccttgtcccgctacatctgcgagatgaccctgcaggaataccactatgtccaggagaaggcttccaagctagctgctgcctccttactcctggccctctacatgaagaagctcggatactgggttcccttcctggagcattacagtggctacagtatctctgagcttcaccccttggtcagacagctgaacaaactgctgactttcagttcttacgatagtctcaaggctgtgtattacaagtattctcacccggtcttctttgaagtcgccaaaatccctgccttggatatgttgaagctggaggagattttgaactgtgattgtgaggctcagggcctggtactctagcagcagccacagggctaagcatgcatgttaacagggtatatttattctatgttcgaatttgtcttttgatcgcttttattcatttttcctttctttgtcttttcccaaactgataatgttataaatatttatgttgcttgtttttatgaaagaaaaaatattgtcatatttgactacaaatttaataaaaaattaatggttattgttaaaaaaaaaaaaaaa

SEQ ID NO: 12 - protein, 291 aa, Homo sapiens
MLLPLPPQSSKPVPKKSQSSKIVPSHHDPSEKTGENCQTKISPSSLQESPSSLQGALKKRSAFEDLTNVSFEMTHETLYLAVKLVDLYLMKAVCKKDKLQLLGATAFMIAAKFEEHNSPRVDDFVYICDDNYQRSEVLSMEINILNVLKCDINIPIAYHFLRRYARCIHTNMKTLTLSRYICEMTLQEYHYVQEKASKLAAASLLLALYMKKLGYWVPFLEHYSGYSISELHPLVRQLNKLLTFSSYDSLKAVYYKYSHPVFFEVAKIPALDMLKLEEILNCDCEAQGLVL

SEQ ID NO: 13 - DNA, 4822 bp, Homo sapiens
  CDS (16)..(3447)
ttacctagattcaagatgaatagcgatcaagttacactggttggtcaagtgtttgagtcatatgtttcggaataccataagaatgatattcttctaatcttgaaggaaagggatgaagatgctcattacccagttgtggttaatgccatgactctgtttgagaccaacatggaaatcggggaatatttcaacatgttccccagtgaagtgcttacaatttttgatagtgcactgcgaaggtcagccttgacaattctccagtccctttctcagcctgaggctgtttccatgaaacagaatcttcatgccaggatatcaggtttgcctgtctgtcctgagctggtgagggaacacatacctaaaaccaaggatgtgggacactttttatctgtcactgggacagtgattcgaacaagtctggtgaaggttctggagtttgagcgggattacatgtgtaacaaatgcaagcatgtgtttgtgatcaaggctgactttgagcagtattacaccttttgccggccatcctcgtgtcccagcttggagagctgtgattcctctaaattcacttgcctctcaggcttgtcttcgtctccaaccaggtgtagagattaccaggaaatcaaaattcaggaacaggttcaaaggctatctgttggaagtattccacgatctatgaaggttattctggaagatgacttagtggatagttgcaaatctggtgatgacctcactatttacgggattgtaatgcaacggtggaagccctttcagcaagatgtgcgctgtgaagtggagatagtcctgaaagcaaattacatccaagtaaataatgagcagtcctcagggatcatcatggatgaggaggtccaaaaggaattcgaagatttttgggaatactataagagcgatccctttgcaggaaggaatgtaatattggctagcttgtgccctcaagtgtttggaatgtatctagtaaagcttgctgtggccatggtgctggctggtgggattcaaaggactgatgctacaggaacacgggtcagaggagaatctcatcttttattggttggggatcctggcacagggaaatctcagttcctcaaatatgcagcaaagattacaccaagatctgtgctgaccacaggaattggatctactagtgcaggtctgacggtaactgctgtaaaagactcaggagaatggaatttggaggctggggcattagttcttgcagatgcgggcctttgctgtattgatgagttcaatagcctcaaagagcatgataggaccagtatccatgaagcaatggagcaacaaaccataagtgttgctaaggctggcctcgtgtgcaagctgaacacaaggaccaccatcctggcagcaacgaaccccaaaggccagtacgacccccaggagtccgtgtctgtgaacattgccctcggcagcccactcttaagtcgatttgacctgatcctggttttgcttgataccaagaatgaagactgggatcgtatcatttcctcctttatcttagaaaataaaggttacccaagcaaatcagagaagctctggagcatggaaaagatgaaaacctatttctgcctcataaggaatctgcagcccacactgtctgatgtgggcaatcaggttcttctccggtactaccagatgcaaaggcagagtgattgccggaacgctgcccggaccaccattcggctgttggaaagcttgatacgattagcagaagctcatgctcgcctgatgtttcgtgatactgtaactctggaagacgctattacggtggtgtcagtcatggagtcctcaatgcagggaggtgcactgctaggaggtgtgaatgccctccacacttcctttcctgaaaaccctggagagcagtaccagagacagtgtgaacttattctggaaaagctagagctgcagagcctcttgagtgaagagcttagaagacttgaaaggttacagaatcagagtgtgcaccaatcccaaccacgggtattggaggtagagactactccaggatccttgagaaatggtccaggggaagaatcaaacttcagaacttcatcacagcaggaaatcaactatagcacacatatcttctctcctggaggcagccccgagggaagcccagttctagatcccccaccgcatctggagcctaatagatcaacaagtaggaaacattcagctcagcacaaaaataacagagatgacagtttagattggtttgatttcatggcaactcatcagagtgaacctaaaaacactgttgttgtgtctcctcatcccaaaacatctggagaaaatatggcttcgaagatctctaacagcacatctcagggtaaggagaagagtgagccaggccaaaggagcaaagtggacattgggttgcttccatcaccaggagagacaggtgttccatggagggcagacaatgtggaaagtaacaagaaaaaaaggctagcactagattctgaagcagcagtctctgctgataaaccagactcagtactgactcatcatgtccccaggaacctgcagaagctgtgcaaagagagggcccagaagttgtgcagaaatagcaccagggtgcctgcacagtgcacagtcccttcccatcctcagtccactcctgtacatagcccagacagaatgctggactcacccaaaagaaagagaccgaaatcccttgcgcaagtggaagagcctgcaattgaaaatgttaagcctccaggttcccctgtggccaaactggcaaaatttactttcaagcagaagtcaaaactgatccactcctttgaagatcacagccatgtgtcacctggtgcaactaaaatagcagttcatagtcctaaaatttcccagcgtagaacaagaagagacgcagccttgccggtgaagcgtccaggaaagttaacatctaccccaggaaaccagatctccagtcagccacagggtgagacaaaggaggtgtcgcagcagccaccagagaaacacggaccaagagagaaggtgatgtgtgcccctgagaagaggattattcagcctgaattagagcttgggaacgagactgggtgtgctcatcttacttgtgagggagacaaaaaggaagaggtttcaggcagtaataaaagcggcaaggttcatgcctgcacattagccagattggcaaacttctgctttactcccccatcggaatccaaatcaaaatcccctcctcctgaaaggaagaaccgaggtgagagaggcccaagctcccctcctacaaccacagctccaatgcgtgtcagtaaaaggaaatcttttcagctccgtgggtccaccgagaaactgattgtttccaaagaatccctcttcactttaccagaactaggtgatgaagcatttgattgtgactgggatgaagagatgagaaaaaagtcatagttgggaaaagctttctggtcaaatctcaccttcttcaactccacagaggaccttcaggatatcaatatggtatttataaatgtatagaacaattggccatattgaggatcactctgaatactggctcccccttaaggctttctaatttcaggttaatcttcatgacttaaaaagttgtataatcagttgaggtcagtgtgataccagcagctgagctgaattaattatgttgtgcttaattttacaaatggagtacttgtattcctgttcctgaagctgtttctgttttttgttttgttttgtttttaagggggagaggttcttccctagattaatttcttctttcattcactcaggaacaaatgtcaagaaggtagcactcataaatctaacaaggcagatgaactcttttctactttttttttttttttttgtattttcacctggaatgggctaagtacagtgaatataatcacttggatgatttgccaaaatcagactatttttctagtattatttttgtattgatttgtgtggatcaggttaaatgtgactaatgcttttctttctttgagaggtatccttacaattccatgatgttcttagagatctggccactggtcaaacagtacctttctgaagtactgaccttctgagttgtcctttctttcttgagccaacattttgtacttcagattcttttttctcttgggggcctaccttcaaccaagtaaaatactgtgattagaagaagagagagtatgagccaggcacagtgactcactcctgtagtcctagctactcggggaggctgaggcaggatgattgcttaagcccaggagttcggggttacagtgagctgtggtcacaccactgtattccagcctgggtgacagagtgagatcctgtctctaaaaataaaataaatgaagaagagagactatgtggtagtctcaatcaaacatcatgtctcatctacccagctggttaatatggaaatgtgattcctactaagttgtgattcacttgtctttaaaaccaaggaaattatatactgtttttggtcagaatagataacctcaagctttgtctttctatgtgcttttaaaatcacttattcctttggattctaataagggttattaggattcagtaattatggactttctcttctgaagtgtgaatttgtaaactgattgtttaattgtcagagggacttttggacatagaatactcaaaactatatgtattttgtttaattttcacttcattcaattcacgcattgaaaacaaatttagaaaatccaatttttcttaagcatttaaacgttctaaaattcactaataaaattttctgaaaaaatttaaactgtga

SEQ ID NO: 14 - protein, 1143 aa, Homo sapiens
MNSDQVTLVGQVFESYVSEYHKNDILLILKERDEDAHYPVVVNAMTLFETNMEIGEYFNMFPSEVLTIFDSALRRSALTILQSLSQPEAVSMKQNLHARISGLPVCPELVREHIPKTKDVGHFLSVTGTVIRTSLVKVLEFERDYMCNKCKHVFVIKADFEQYYTFCRPSSCPSLESCDSSKFTCLSGLSSSPTRCRDYQEIKIQEQVQRLSVGSIPRSMKVILEDDLVDSCKSGDDLTIYGIVMQRWKPFQQDVRCEVEIVLKANYIQVNNEQSSGIIMDEEVQKEFEDFWEYYKSDPFAGRNVILASLCPQVFGMYLVKLAVAMVLAGGIQRTDATGTRVRGESHLLLVGDPGTGKSQFLKYAAKITPRSVLTTGIGSTSAGLTVTAVKDSGEWNLEAGALVLADAGLCCIDEFNSLKEHDRTSIHEAMEQQTISVAKAGLVCKLNTRTTILAATNPKGQYDPQESVSVNIALGSPLLSRFDLILVLLDTKNEDWDRIISSFILENKGYPSKSEKLWSMEKMKTYFCLIRNLQPTLSDVGNQVLLRYYQMQRQSDCRNAARTTIRLLESLIRLAEAHARLMFRDTVTLEDAITVVSVMESSMQGGALLGGVNALHTSFPENPGEQYQRQCELILEKLELQSLLSEELRRLERLQNQSVHQSQPRVLEVETTPGSLRNGPGEESNFRTSSQQEINYSTHIFSPGGSPEGSPVLDPPPHLEPNRSTSRKHSAQHKNNRDDSLDWFDFMATHQSEPKNTVVVSPHPKTSGENMASKISNSTSQGKEKSEPGQRSKVDIGLLPSPGETGVPWRADNVESNKKKRLALDSEAAVSADKPDSVLTHHVPRNLQKLCKERAQKLCRNSTRVPAQCTVPSHPQSTPVHSPDRMLDSPKRKRPKSLAQVEEPAIENVKPPGSPVAKLAKFTFKQKSKLIHSFEDHSHVSPGATKIAVHSPKISQRRTRRDAALPVKRPGKLTSTPGNQISSQPQGETKEVSQQPPEKHGPREKVMCAPEKRIIQPELELGNETGCAHLTCEGDKKEEVSGSNKSGKVHACTLARLANFCFTPPSESKSKSPPPERKNRGERGPSSPPTTTAPMRVSKRKSFQLRGSTEKLIVSKESLFTLPELGDEAFDCDWDEEMRKKS

SEQ ID NO: 15 - DNA, 13147 bp, Homo sapiens
  CDS (386)..(9556)
ccggagcccgagccgaagggcgagccgcaaacgctaagtcgctggccattggtggacatggcgcaggcgcgtttgctccgacgggccgaatgttttggggcagtgttttgagcgcggagaccgcgtgatactggatgcgcatgggcataccgtgctctgcggctgcttggcgttgcttcttcctccagaagtgggcgctgggcagtcacgcagggtttgaaccggaagcgggagtaggtagctgcgtggctaacggagaaaagaagccgtggccgcgggaggaggcgagaggagtcgggatctgcgctgcagccaccgccgcggttgatactactttgaccttccgagtgcagtgacagtgatgtgtgttctgaaattgtgaaccatgagtctagtacttaatgatctgcttatctgctgccgtcaactagaacatgatagagctacagaacgaaagaaagaagttgagaaatttaagcgcctgattcgagatcctgaaacaattaaacatctagatcggcattcagattccaaacaaggaaaatatttgaattgggatgctgtttttagatttttacagaaatatattcagaaagaaacagaatgtctgagaatagcaaaaccaaatgtatcagcctcaacacaagcctccaggcagaaaaagatgcaggaaatcagtagtttggtcaaatacttcatcaaatgtgcaaacagaagagcacctaggctaaaatgtcaagaactcttaaattatatcatggatacagtgaaagattcatctaatggtgctatttacggagctgattgtagcaacatactactcaaagacattctttctgtgagaaaatactggtgtgaaatatctcagcaacagtggttagaattgttctctgtgtacttcaggctctatctgaaaccttcacaagatgttcatagagttttagtggctagaataattcatgctgttaccaaaggatgctgttctcagactgacggattaaattccaaatttttggactttttttccaaggctattcagtgtgcgagacaagaaaagagctcttcaggtctaaatcatatcttagcagctcttactatcttcctcaagactttggctgtcaactttcgaattcgagtgtgtgaattaggagatgaaattcttcccactttgctttatatttggactcaacataggcttaatgattctttaaaagaagtcattattgaattatttcaactgcaaatttatatccatcatccgaaaggagccaaaacccaagaaaaaggtgcttatgaatcaacaaaatggagaagtattttatacaacttatatgatctgctagtgaatgagataagtcatataggaagtagaggaaagtattcttcaggatttcgtaatattgccgtcaaagaaaatttgattgaattgatggcagatatctgtcaccaggtttttaatgaagataccagatccttggagatttctcaatcttacactactacacaaagagaatctagtgattacagtgtcccttgcaaaaggaagaaaatagaactaggctgggaagtaataaaagatcaccttcagaagtcacagaatgattttgatcttgtgccttggctacagattgcaacccaattaatatcaaagtatcctgcaagtttacctaactgtgagctgtctccattactgatgatactatctcagcttctaccccaacagcgacatggggaacgtacaccatatgtgttacgatgccttacggaagttgcattgtgtcaagacaagaggtcaaacctagaaagctcacaaaagtcagatttattaaaactctggaataaaatttggtgtattacctttcgtggtataagttctgagcaaatacaagctgaaaactttggcttacttggagccataattcagggtagtttagttgaggttgacagagaattctggaagttatttactgggtcagcctgcagaccttcatgtcctgcagtatgctgtttgactttggcactgaccaccagtatagttccaggaacggtaaaaatgggaatagagcaaaatatgtgtgaagtaaatagaagcttttctttaaaggaatcaataatgaaatggctcttattctatcagttagagggtgacttagaaaatagcacagaagtgcctccaattcttcacagtaattttcctcatcttgtactggagaaaattcttgtgagtctcactatgaaaaactgtaaagctgcaatgaattttttccaaagcgtgccagaatgtgaacaccaccaaaaagataaagaagaactttcattctcagaagtagaagaactatttcttcagacaacttttgacaagatggactttttaaccattgtgagagaatgtggtatagaaaagcaccagtccagtattggcttctctgtccaccagaatctcaaggaatcactggatcgctgtcttctgggattatcagaacagcttctgaataattactcatctgagattacaaattcagaaactcttgtccggtgttcacgtcttttggtgggtgtccttggctgctactgttacatgggtgtaatagctgaagaggaagcatataagtcagaattattccagaaagccaagtctctaatgcaatgtgcaggagaaagtatcactctgtttaaaaataagacaaatgaggaattcagaattggttccttgagaaatatgatgcagctatgtacacgttgcttgagcaactgtaccaagaagagtccaaataagattgcatctggctttttcctgcgattgttaacatcaaagctaatgaatgacattgcagatatttgtaaaagtttagcatccttcatcaaaaagccatttgaccgtggagaagtagaatcaatggaagatgatactaatggaaatctaatggaggtggaggatcagtcatccatgaatctatttaacgattaccctgatagtagtgttagtgatgcaaacgaacctggagagagccaaagtaccataggtgccattaatcctttagctgaagaatatctgtcaaagcaagatctacttttcttagacatgctcaagttcttgtgtttgtgtgtaactactgctcagaccaatactgtgtcctttagggcagctgatattcggaggaaattgttaatgttaattgattctagcacgctagaacctaccaaatccctccacctgcatatgtatctaatgcttttaaaggagcttcctggagaagagtaccccttgccaatggaagatgttcttgaacttctgaaaccactatccaatgtgtgttctttgtatcgtcgtgaccaagatgtttgtaaaactattttaaaccatgtccttcatgtagtgaaaaacctaggtcaaagcaatatggactctgagaacacaagggatgctcaaggacagtttcttacagtaattggagcattttggcatctaacaaaggagaggaaatatatattctctgtaagaatggccctagtaaattgccttaaaactttgcttgaggctgatccttattcaaaatgggccattcttaatgtaatgggaaaagactttcctgtaaatgaagtatttacacaatttcttgctgacaatcatcaccaagttcgcatgttggctgcagagtcaatcaatagattgttccaggacacgaagggagattcttccaggttactgaaagcacttcctttgaagcttcagcaaacagcttttgaaaatgcatacttgaaagctcaggaaggaatgagagaaatgtcccatagtgctgagaaccctgaaactttggatgaaatttataatagaaaatctgttttactgacgttgatagctgtggttttatcctgtagccctatctgcgaaaaacaggctttgtttgccctgtgtaaatctgtgaaagagaatggattagaacctcaccttgtgaaaaaggttttagagaaagtttctgaaacttttggatatagacgtttagaagactttatggcatctcatttagattatctggttttggaatggctaaatcttcaagatactgaatacaacttatcttcttttccttttattttattaaactacacaaatattgaggatttctatagatcttgttataaggttttgattccacatctggtgattagaagtcattttgatgaggtgaagtccattgctaatcagattcaagaggactggaaaagtcttctaacagactgctttccaaagattcttgtaaatattcttccttattttgcctatgagggtaccagagacagtgggatggcacagcaaagagagactgctaccaaggtctatgatatgcttaaaagtgaaaacttattgggaaaacagattgatcacttattcattagtaatttaccagagattgtggtggagttattgatgacgttacatgagccagcaaattctagtgccagtcagagcactgacctctgtgacttttcaggggatttggatcctgctcctaatccacctcattttccatcgcatgtgattaaagcaacatttgcctatatcagcaattgtcataaaaccaagttaaaaagcattttagaaattctttccaaaagccctgattcctatcagaaaattcttcttgccatatgtgagcaagcagctgaaacaaataatgtttataagaagcacagaattcttaaaatatatcacctgtttgttagtttattactgaaagatataaaaagtggcttaggaggagcttgggcctttgttcttcgagacgttatttatactttgattcactatatcaaccaaaggccttcttgtatcatggatgtgtcattacgtagcttctccctttgttgtgacttattaagtcaggtttgccagacagccgtgacttactgtaaggatgctctagaaaaccatcttcatgttattgttggtacacttataccccttgtgtatgagcaggtggaggttcagaaacaggtattggacttgttgaaatacttagtgatagataacaaggataatgaaaacctctatatcacgattaagcttttagatccttttcctgaccatgttgtttttaaggatttgcgtattactcagcaaaaaatcaaatacagtagaggacccttttcactcttggaggaaattaaccattttctctcagtaagtgtttatgatgcacttccattgacaagacttgaaggactaaaggatcttcgaagacaactggaactacataaagatcagatggtggacattatgagagcttctcaggataatccgcaagatgggattatggtgaaactagttgtcaatttgttgcagttatccaagatggcaataaaccacactggtgaaaaagaagttctagaggctgttggaagctgcttgggagaagtgggtcctatagatttctctaccatagctatacaacatagtaaagatgcatcttataccaaggcccttaagttatttgaagataaagaacttcagtggaccttcataatgctgacctacctgaataacacactggtagaagattgtgtcaaagttcgatcagcagctgttacctgtttgaaaaacattttagccacaaagactggacatagtttctgggagatttataagatgacaacagatccaatgctggcctatctacagccttttagaacatcaagaaaaaagtttttagaagtacccagatttgacaaagaaaacccttttgaaggcctggatgatataaatctgtggattcctctaagtgaaaatcatgacatttggataaagacactgacttgtgcttttttggacagtggaggcacaaaatgtgaaattcttcaattattaaagccaatgtgtgaagtgaaaactgacttttgtcagactgtacttccatacttgattcatgatattttactccaagatacaaatgaatcatggagaaatctgctttctacacatgttcagggatttttcaccagctgtcttcgacacttctcgcaaacgagccgatccacaacccctgcaaacttggattcagagtcagagcactttttccgatgctgtttggataaaaaatcacaaagaacaatgcttgctgttgtggactacatgagaagacaaaagagaccttcttcaggaacaatttttaatgatgctttctggctggatttaaattatctagaagttgccaaggtagctcagtcttgtgctgctcactttacagctttactctatgcagaaatctatgcagataagaaaagtatggatgatcaagagaaaagaagtcttgcatttgaagaaggaagccagagtacaactatttctagcttgagtgaaaaaagtaaagaagaaactggaataagtttacaggatcttctcttagaaatctacagaagtataggggagccagatagtttgtatggctgtggtggagggaagatgttacaacccattactagactacgaacatatgaacacgaagcaatgtggggcaaagccctagtaacatatgacctcgaaacagcaatcccctcatcaacacgccaggcaggaatcattcaggccttgcagaatttgggactctgccatattctttccgtctatttaaaaggattggattatgaaaataaagactggtgtcctgaactagaagaacttcattaccaagcagcatggaggaatatgcagtgggaccattgcacttccgtcagcaaagaagtagaaggaaccagttaccatgaatcattgtacaatgctctacaatctctaagagacagagaattctctacattttatgaaagtctcaaatatgccagagtaaaagaagtggaagagatgtgtaagcgcagccttgagtctgtgtattcgctctatcccacacttagcaggttgcaggccattggagagctggaaagcattggggagcttttctcaagatcagtcacacatagacaactctctgaagtatatattaagtggcagaaacactcccagcttctcaaggacagtgattttagttttcaggagcctatcatggctctacgcacagtcattttggagatcctgatggaaaaggaaatggacaactcacaaagagaatgtattaaggacattctcaccaaacaccttgtagaactctctatactggccagaactttcaagaacactcagctccctgaaagggcaatatttcaaattaaacagtacaattcagttagctgtggagtctctgagtggcagctggaagaagcacaagtattctgggcaaaaaaggagcagagtcttgccctgagtattctcaagcaaatgatcaagaagttggatgccagctgtgcagcgaacaatcccagcctaaaacttacatacacagaatgtctgagggtttgtggcaactggttagcagaaacgtgcttagaaaatcctgcggtcatcatgcagacctatctagaaaaggcagtagaagttgctggaaattatgatggagaaagtagtgatgagctaagaaatggaaaaatgaaggcatttctctcattagcccggttttcagatactcaataccaaagaattgaaaactacatgaaatcatcggaatttgaaaacaagcaagctctcctgaaaagagccaaagaggaagtaggtctccttagggaacataaaattcagacaaacagatacacagtaaaggttcagcgagagctggagttggatgaattagccctgcgtgcactgaaagaggatcgtaaacgcttcttatgtaaagcagttgaaaattatatcaactgcttattaagtggagaagaacatgatatgtgggtattccgactttgttccctctggcttgaaaattctggagtttctgaagtcaatggcatgatgaagagagacggaatgaagattccaacatataaatttttgcctcttatgtaccaattggctgctagaatggggaccaagatgatgggaggcctaggatttcatgaagtcctcaataatctaatctctagaatttcaatggatcacccccatcacactttgtttattatactggccttagcaaatgcaaacagagatgaatttctgactaaaccagaggtagccagaagaagcagaataactaaaaatgtgcctaaacaaagctctcagcttgatgaggatcgaacagaggctgcaaatagaataatatgtactatcagaagtaggagacctcagatggtcagaagtgttgaggcactttgtgatgcttatattatattagcaaacttagatgccactcagtggaagactcagagaaaaggcataaatattccagcagaccagccaattactaaacttaagaatttagaagatgttgttgtccctactatggaaattaaggtggaccacacaggagaatatggaaatctggtgactatacagtcatttaaagcagaatttcgcttagcaggaggtgtaaatttaccaaaaataatagattgtgtaggttccgatggcaaggagaggagacagcttgttaagggccgtgatgacctgagacaagatgctgtcatgcaacaggtcttccagatgtgtaatacattactgcagagaaacacggaaactaggaagaggaaattaactatctgtacttataaggtggttcccctctctcagcgaagtggtgttcttgaatggtgcacaggaactgtccccattggtgaatttcttgttaacaatgaagatggtgctcataaaagatacaggccaaatgatttcagtgcctttcagtgccaaaagaaaatgatggaggtgcaaaaaaagtcttttgaagagaaatatgaagtcttcatggatgtttgccaaaattttcaaccagttttccgttacttctgcatggaaaaattcttggatccagctatttggtttgagaagcgattggcttatacgcgcagtgtagctacttcttctattgttggttacatacttggacttggtgatagacatgtacagaatatcttgataaatgagcagtcagcagaacttgtacatatagatctaggtgttgcttttgaacagggcaaaatccttcctactcctgagacagttccttttagactcaccagagatattgtggatggcatgggcattacgggtgttgaaggtgtcttcagaagatgctgtgagaaaaccatggaagtgatgagaaactctcaggaaactctgttaaccattgtagaggtccttctatatgatccactctttgactggaccatgaatcctttgaaagctttgtatttacagcagaggccggaagatgaaactgagcttcaccctactctgaatgcagatgaccaagaatgcaaacgaaatctcagtgatattgaccagagtttcaacaaagtagctgaacgtgtcttaatgagactacaagagaaactgaaaggagtggaagaaggcactgtgctcagtgttggtggacaagtgaatttgctcatacagcaggccatagaccccaaaaatctcagccgacttttcccaggatggaaagcttgggtgtgatcttcagtatatgaattaccctttcattcagcctttagaaattatattttagcctttatttttaacctgccaacatactttaagtagggattaatatttaagtgaactattgtgggtttttttgaatgttggttttaatacttgatttaatcaccactcaaaaatgttttgatggtcttaaggaacatctctgctttcactctttagaaataatggtcattcgggctgggcgcagcggctcacgcctgtaatcccagcactttgggaggccgaggtgagcggatcacaaggtcaggagttcgagaccagcctggccaagagaccagcctggccagtatggtgaaaccctgtctctactaaaaatacaaaaattagccgagcatggtggcgggcacctgtaatcccagctactcgagaggctgaggcaggagaatctcttgaacctgggaggtgaaggttgctgtgggccaaaatcatgccattgcactccagcctgggtgacaagagcgaaactccatctcaaaaaaaaaaaaaaaaaaacagaaacgtatttggatttttcctagtaagatcactcagtgttactaaataatgaagttgttatggagaacaaatttcaaagacacagttagtgtagttactatttttttaagtgtgtattaaaacttctcattctattctctttatcttttaagcccttctgtactgtccatgtatgttatctttctgtgataacttcatagattgccttctagttcatgaattctcttgtcagatgtatataatctcttttaccctatccattgggcttcttctttcagaaattgtttttcatttctaattatgcatcatttttcagatctctgtttcttgatgtcatttttaatgtttttttaatgttttttatgtcactaattattttaaatgtctgtacttgatagacactgtaatagttctattaaatttagttcctgctgtttatatctgttgatttttgtatttgataggctgttcatccagttttgtctttttgaaaagtgagtttattttcagcaaggctttatctatgggaatcttgagtgtctgtttatgtcatattcccagggctgttgctgcacacaagcccattcttattttaatttcttggctttagggtttccatacctgaagtgtagcataaatactgataggagatttcccaggccaaggcaaacacacttcctcctcatctccttgtgctagtgggcagaatatttgattgatgcctttttcactgagagtataagcttccatgtgtcccacctttatggcaggggtggaaggaggtacatttaattcccactgcctgcctttggcaagccctgggttctttgctccccatatagatgtctaagctaaaagccgtgggttaatgagactggcaaattgttccaggacagctacagcatcagctcacatattcacctctctggtttttcattcccctcatttttttctgagacagagtcttgctctgtcacccaggctggagtgcagtggcatgatctcagctcactgaaacctctgcctcctgggttcaagcaattctcctgcctcagcctcccgagtagctgggactacaggcgtgtgccaacacgcccggctaattttttgtatttttattagagacggagtttcaccgtgttagccaggatggtctcgatcgcttgacctcgtgatccaccctcctcggcctcccaaagtgctgggattacaggtgtgagccaccgcgcccggcctcattcccctcatttttgaccgtaaggatttcccctttcttgtaagttctgctatgtatttaaaagaatgttttctacattttatccagcatttctctgtgttctgttggaagggaagggcttaggtatctagtttgatacataggtagaagtggaacatttctctgtcccccagctgtcatcatataagataaacatcagataaaaagccacctgaaagtaaaactactgactcgtgtattagtgagtataatctcttctccatccttaggaaaatgttcatcccagctgcggagattaacaaatgggtgattgagctttctcctcgtatttggaccttgaaggttatataaatttttttcttatgaagagttggcatttctttttattgccaatggcaggcactcattcatatttgatctcctcaccttcccctcccctaaaaccaatctccagaactttttggactataaatttcttggtttgacttctggagaactgttcagaatattactttgcatttcaaattacaaacttaccttggtgtatctttttcttacaagctgcctaaatgaatatttggtatatattggtagttttattactatagtaaatcaaggaaatgcagtaaacttaaaatgtctttaagaaagccctgaaatcttcatgggtgaaattagaaattatcaactagataatagtatagataaatgaatttgtagctaattcttgctagttgttgcatccagagagctttgaataacatcattaatctactctttagccttgcatggtatgctatgaggctcctgttctgttcaagtattctaatcaatggctttgaaaagtttatcaaatttacatacagatcacaagcctaggagaaataactaattcacagatgacagaattaagattataaaagattttttttttgtaattttagtagagacagggttgccattgtattccagccttggcgacagagcaagactctgcctcaaaaaaaaaaaaaaaaaggttttggcaagctggaactctttctgcaaatgactaagatagaaaactgccaaggacaaatgaggagtagttagattttgaaaatattaatcatagaatagttgttgtatgctaagtcactgacccatattatgtacagcatttctgatctttactttgcaagattagtgatactatcccaatacactgctggagaaatcagaatttggagaaataagttgtccaaggcaagaagatagtaaattataagtacaagtgtaatatggacagtatctaacttgaaaagatttcaggcgaaaagaatctggggtttgccagtcagttgctcaaaaggtcaatgaaaaccaaatagtgaagctatcagagaagctaataaattatagactgcttgaacagttgtgtccagattaagggagataatagctttcccaccctactttgtgcaggtcatacctccccaaagtgtttacctaatcagtaggttcacaaactcttggtcattatagtatatgcctaaaatgtatgcacttaggaatgctaaaaatttaaatatggtctaaagcaaataaaagcaaagaggaaaaactttggacagcgtaaagactagaatagtcttttaaaaagaaagccagtatattggtttgaaatatagagatgtgtcccaatttcaagtattttaattgcaccttaatgaaattatctattttctatagattttagtactattgaatgtattactttactgttacctgaatttattataaagtgtttttgaataaataattctaaaagc

SEQ ID NO: 16 - protein, 3056 aa, Homo sapiens
MSLVLNDLLICCRQLEHDRATERKKEVEKFKRLIRDPETIKHLDRHSDSKQGKYLNWDAVFRFLQKYIQKETECLRIAKPNVSASTQASRQKKMQEISSLVKYFIKCANRRAPRLKCQELLNYIMDTVKDSSNGAIYGADCSNILLKDILSVRKYWCEISQQQWLELFSVYFRLYLKPSQDVHRVLVARIIHAVTKGCCSQTDGLNSKFLDFFSKAIQCARQEKSSSGLNHILAALTIFLKTLAVNFRIRVCELGDEILPTLLYIWTQHRLNDSLKEVIIELFQLQIYIHHPKGAKTQEKGAYESTKWRSILYNLYDLLVNEISHIGSRGKYSSGFRNIAVKENLIELMADICHQVFNEDTRSLEISQSYTTTQRESSDYSVPCKRKKIELGWEVIKDHLQKSQNDFDLVPWLQIATQLISKYPASLPNCELSPLLMILSQLLPQQRHGERTPYVLRCLTEVALCQDKRSNLESSQKSDLLKLWNKIWCITFRGISSEQIQAENFGLLGAIIQGSLVEVDREFWKLFTGSACRPSCPAVCCLTLALTTSIVPGTVKMGIEQNMCEVNRSFSLKESIMKWLLFYQLEGDLENSTEVPPILHSNFPHLVLEKILVSLTMKNCKAAMNFFQSVPECEHHQKDKEELSFSEVEELFLQTTFDKMDFLTIVRECGIEKHQSSIGFSVHQNLKESLDRCLLGLSEQLLNNYSSEITNSETLVRCSRLLVGVLGCYCYMGVIAEEEAYKSELFQKAKSLMQCAGESITLFKNKTNEEFRIGSLRNMMQLCTRCLSNCTKKSPNKIASGFFLRLLTSKLMNDIADICKSLASFIKKPFDRGEVESMEDDTNGNLMEVEDQSSMNLFNDYPDSSVSDANEPGESQSTIGAINPLAEEYLSKQDLLFLDMLKFLCLCVTTAQTNTVSFRAADIRRKLLMLIDSSTLEPTKSLHLHMYLMLLKELPGEEYPLPMEDVLELLKPLSNVCSLYRRDQDVCKTILNHVLHVVKNLGQSNMDSENTRDAQGQFLTVIGAFWHLTKERKYIFSVRMALVNCLKTLLEADPYSKWAILNVMGKDFPVNEVFTQFLADNHHQVRMLAAESINRLFQDTKGDSSRLLKALPLKLQQTAFENAYLKAQEGMREMSHSAENPETLDEIYNRKSVLLTLIAVVLSCSPICEKQALFALCKSVKENGLEPHLVKKVLEKVSETFGYRRLEDFMASHLDYLVLEWLNLQDTEYNLSSFPFILLNYTNIEDFYRSCYKVLIPHLVIRSHFDEVKSIANQIQEDWKSLLTDCFPKILVNILPYFAYEGTRDSGMAQQRETATKVYDMLKSENLLGKQIDHLFISNLPEIVVELLMTLHEPANSSASQSTDLCDFSGDLDPAPNPPHFPSHVIKATFAYISNCHKTKLKSILEILSKSPDSYQKILLAICEQAAETNNVYKKHRILKIYHLFVSLLLKDIKSGLGGAWAFVLRDVIYTLIHYINQRPSCIMDVSLRSFSLCCDLLSQVCQTAVTYCKDALENHLHVIVGTLIPLVYEQVEVQKQVLDLLKYLVIDNKDNENLYITIKLLDPFPDHVVFKDLRITQQKIKYSRGPFSLLEEINHFLSVSVYDALPLTRLEGLKDLRRQLELHKDQMVDIMRASQDNPQDGIMVKLVVNLLQLSKMAINHTGEKEVLEAVGSCLGEVGPIDFSTIAIQHSKDASYTKALKLFEDKELQWTFIMLTYLNNTLVEDCVKVRSAAVTCLKNILATKTGHSFWEIYKMTTDPMLAYLQPFRTSRKKFLEVPRFDKENPFEGLDDINLWIPLSENHDIWIKTLTCAFLDSGGTKCEILQLLKPMCEVKTDFCQTVLPYLIHDILLQDTNESWRNLLSTHVQGFFTSCLRHFSQTSRSTTPANLDSESEHFFRCCLDKKSQRTMLAVVDYMRRQKRPSSGTIFNDAFWLDLNYLEVAKVAQSCAAHFTALLYAEIYADKKSMDDQEKRSLAFEEGSQSTTISSLSEKSKEETGISLQDLLLEIYRSIGEPDSLYGCGGGKMLQPITRLRTYEHEAMWGKALVTYDLETAIPSSTRQAGIIQALQNLGLCHILSVYLKGLDYENKDWCPELEELHYQAAWRNMQWDHCTSVSKEVEGTSYHESLYNALQSLRDREFSTFYESLKYARVKEVEEMCKRSLESVYSLYPTLSRLQAIGELESIGELFSRSVTHRQLSEVYIKWQKHSQLLKDSDFSFQEPIMALRTVILEILMEKEMDNSQRECIKDILTKHLVELSILARTFKNTQLPERAIFQIKQYNSVSCGVSEWQLEEAQVFWAKKEQSLALSILKQMIKKLDASCAANNPSLKLTYTECLRVCGNWLAETCLENPAVIMQTYLEKAVEVAGNYDGESSDELRNGKMKAFLSLARFSDTQYQRIENYMKSSEFENKQALLKRAKEEVGLLREHKIQTNRYTVKVQRELELDELALRALKEDRKRFLCKAVENYINCLLSGEEHDMWVFRLCSLWLENSGVSEVNGMMKRDGMKIPTYKFLPLMYQLAARMGTKMMGGLGFHEVLNNLISRISMDHPHHTLFIILALANANRDEFLTKPEVARRSRITKNVPKQSSQLDEDRTEAANRIICTIRSRRPQMVRSVEALCDAYIILANLDATQWKTQRKGINIPADQPITKLKNLEDVVVPTMEIKVDHTGEYGNLVTIQSFKAEFRLAGGVNLPKIIDCVGSDGKERRQLVKGRDDLRQDAVMQQVFQMCNTLLQRNTETRKRKLTICTYKVVPLSQRSGVLEWCTGTVPIGEFLVNNEDGAHKRYRPNDFSAFQCQKKMMEVQKKSFEEKYEVFMDVCQNFQPVFRYFCMEKFLDPAIWFEKRLAYTRSVATSSIVGYILGLGDRHVQNILINEQSAELVHIDLGVAFEQGKILPTPETVPFRLTRDIVDGMGITGVEGVFRRCCEKTMEVMRNSQETLLTIVEVLLYDPLFDWTMNPLKALYLQQRPEDETELHPTLNADDQECKRNLSDIDQSFNKVAERVLMRLQEKLKGVEEGTVLSVGGQVNLLIQQAIDPKNLSRLFPGWKAWV

SEQ ID NO: 17 - DNA, 3717 bp, Homo sapiens
  CDS (365)..(1939)
gaacagcgaagacagcgtgagcctgggccgttgcctcgaggctctcgcccggcttctcttgccgacccgccacgtttgtttggatttaatcttcaggttgccggcgcccgcccgcccgctggcctcgcggtgtgagagggaagcacccgtgcctgtggctggtggctggcgcctggagggtccgcacacccgcccggccgcgccgcttgcccgcggcagccgcgtccctgaaccgcggagtcgtgtttgtgtttgacccgcgggcgccggtggcgcgcggccgaggccggtgtcggcggggcggggcggtcgcggcggaggcagaggaagagggagcgggagctctgcgaggccgggcgccgccatggaactgggcccggagcccccgcaccgccgccgcctgctcttcgcctgcagcccccctcccgcgtcgcagcccgtcgtgaaggcgctatttggcgcttcagccgccgggggactgtcgcctgtcaccaacctgaccgtcactatggaccagctgcagggtctgggcagtgattatgagcaaccactggaggtgaagaacaacagtaatctgcagagaatgggctcctccgagtcaacagattcaggtttctgtctagattctcctgggccattggacagtaaagaaaaccttgaaaatcctatgagaagaatacattccctacctcagaagctgttgggatgtagtccagctctgaagaggagccattctgattctcttgaccatgacatctttcagctcatcgacccagatgagaacaaggaaaatgaagcctttgagtttaagaagccagtaagacctgtatctcgtggctgcctgcactctcatggactccaggagggtaaagatctcttcacacagaggcagaactctgccccagctcggatgctttcctcaaatgaaagagatagcagtgaaccagggaatttcattcctctttttacaccccagtcacctgtgacagccactttgtctgatgaggatgatggcttcgtggaccttctcgatggagagaatctgaagaatgaggaggagaccccctcgtgcatggcaagcctctggacagctcctctcgtcatgagaactacaaaccttgacaaccgatgcaagctgtttgactccccttccctgtgtagctccagcactcggtcagtgttgaagagaccagaacgatctcaagaggagtctccacctggaagtacaaagaggaggaagagcatgtctggggccagccccaaagagtcaactaatccagagaaggcccatgagactcttcatcagtctttatccctggcatcttcccccaaaggaaccattgagaacattttggacaatgacccaagggaccttataggagacttctccaagggttatctctttcatacagttgctgggaaacatcaggatttaaaatacatctctccagaaattatggcatctgttttgaatggcaagtttgccaacctcattaaagagtttgttatcatcgactgtcgatacccatatgaatacgagggaggccacatcaagggtgcagtgaacttgcacatggaagaagaggttgaagacttcttattgaagaagcccattgtacctactgatggcaagcgtgtcattgttgtgtttcactgcgagttttcttctgagagaggtccccgcatgtgccggtatgtgagagagagagatcgcctgggtaatgaataccccaaactccactaccctgagctgtatgtcctgaaggggggatacaaggagttctttatgaaatgccagtcttactgtgagccccctagctaccggcccatgcaccacgaggactttaaagaagacctgaagaagttccgcaccaagagccggacctgggcaggggagaagagcaagagggagatgtacagtcgtctgaagaagctctgagggcggcaggaccagccagcagcagcccaagcttccctccatccccctttaccctctttgctgcagagaaacttaagcaaaggggacagctgtgtgacatttggagagggggcctgggacttccatgccttaaacctacctcccacactcccaaggttggagcccagggcatcttgctggctacgcctcttctgtccctgttagacgtcctccgtccatatcagaactgtgccacaatgcagttctgagcaccgtgtcaagctgctctgagccacagtgggatgaaccagccggggccttatcgggctccagccatctcatgaggggagaggagacggaggggagtagagaagttacacagaaatgctgctggccaaatagcaaagacaacctgggaaggaaaggtctttgtgggataatccatatgtttaatttattcaacttcatcaatcactttattttatttttttttctaactcctggagacttattttactgcttcattaggttgaaatactgccattctaggtagggttttattatcccagggactacctcggcttttaatttaaaaaaaaaaaagaagtgggtaagaaaatgcaaacctgttataagttatcggacagaaagctaggtgctctgtcacccccaggaggcgctgtggtactggggctgctgctatttaagccaagaactgaggtcctggtgagagcgttggacccaggcttggctgcctgacataagctaaatctcccagacccaccactggctaccgatatctatttggtgggaggtgtggccctgttcttcctcaccccagttccatgacattggctggtataggagccacagtcaggaaagcacttgaggcagcatctgttgggccacccccggctcagtgctggaatgttgcagtgtaggtttcccagggaaggggggtgggggtaggtgggctccacaggatgggggaggagcatgtccactgagtatcttccttatgttgctgtgatattgatagcttttattttctaatttttaaaaaatggtcatattatgagtcaaagagtatcaaatcagtgttggatggaccacccaagggtgaggagaggggctggaagccctgggcattaggagaagggagtgggtgctggcatggacatgactggatagaattttctcaggagggagcttggtggattttgaaggtaaaactttctgggtttatcatgttttaattttagagacagggagtgatgaatcatcaccggttgtccccttatctaactccataaaagtgggaatttcaaaagaacacctcatccaaggagctggggcagacttcattgattctagagagacctgtttcagtgcctactcatccctgccctctggtgccagcctccttaccatcacggcttcactgaggtgtaggtgggtttttcttaaacaggagacagtctctcccctcttacctcaacttcttggggtgggaatcagtgatactggagatggctagttgctgtgttacgggtttgagttacatttggctataaaacaatcttgttgggaaaaatgtgggggagaggacttcttcctacacgcgcattgagacagattccaactggttaatgatattgtttgtaagaaagagattctgttggttgactgcctaaagagaaaggtgggatggccttcagattataccagcttagctagcattactaaccaactgttggaagctctgaaaataaaagatcttgaacccataaaaaaaaaaa

SEQ ID NO: 18 - protein, 524 aa, Homo sapiens
MELGPEPPHRRRLLFACSPPPASQPVVKALFGASAAGGLSPVTNLTVTMDQLQGLGSDYEQPLEVKNNSNLQRMGSSESTDSGFCLDSPGPLDSKENLENPMRRIHSLPQKLLGCSPALKRSHSDSLDHDIFQLIDPDENKENEAFEFKKPVRPVSRGCLHSHGLQEGKDLFTQRQNSAPARMLSSNERDSSEPGNFIPLFTPQSPVTATLSDEDDGFVDLLDGENLKNEEETPSCMASLWTAPLVMRTTNLDNRCKLFDSPSLCSSSTRSVLKRPERSQEESPPGSTKRRKSMSGASPKESTNPEKAHETLHQSLSLASSPKGTIENILDNDPRDLIGDFSKGYLFHTVAGKHQDLKYISPEIMASVLNGKFANLIKEFVIIDCRYPYEYEGGHIKGAVNLHMEEEVEDFLLKKPIVPTDGKRVIVVFHCEFSSERGPRMCRYVRERDRLGNEYPKLHYPELYVLKGGYKEFFMKCQSYCEPPSYRPMHHEDFKEDLKKFRTKSRTWAGEKSKREMYSRLKKL

SEQ ID NO: 19 - DNA, 13509 bp, Homo sapiens
  CDS (58)..(12444)
ggggcatttccgggtccgggccgagcgggcgcacgcgcgggagcgggactcggcggcatggcgggctccggagccggtgtgcgttgctccctgctgcggctgcaggagaccttgtccgctgcggaccgctgcggtgctgccctggccggtcatcaactgatccgcggcctggggcaggaatgcgtcctgagcagcagccccgcggtgctggcattacagacatctttagttttttccagagatttcggtttgcttgtatttgtccggaagtcactcaacagtattgaatttcgtgaatgtagagaagaaatcctaaagtttttatgtattttcttagaaaaaatgggccagaagatcgcaccttactctgttgaaattaagaacacttgtaccagtgtttatacaaaagatagagctgctaaatgtaaaattccagccctggaccttcttattaagttacttcagacttttagaagttctagactcatggatgaatttaaaattggagaattatttagtaaattctatggagaacttgcattgaaaaaaaaaataccagatacagttttagaaaaagtatatgagctcctaggattattgggtgaagttcatcctagtgagatgataaataatgcagaaaacctgttccgcgcttttctgggtgaacttaagacccagatgacatcagcagtaagagagcccaaactacctgttctggcaggatgtctgaaggggttgtcctcacttctgtgcaacttcactaagtccatggaagaagatccccagacttcaagggagatttttaattttgtactaaaggcaattcgtcctcagattgatctgaagagatatgctgtgccctcagctggcttgcgcctatttgccctgcatgcatctcagtttagcacctgccttctggacaactacgtgtctctatttgaagtcttgttaaagtggtgtgcccacacaaatgtagaattgaaaaaagctgcactttcagccctggaatcctttctgaaacaggtttctaatatggtggcgaaaaatgcagaaatgcataaaaataaactgcagtactttatggagcagttttatggaatcatcagaaatgtggattcgaacaacaaggagttatctattgctatccgtggatatggactttttgcaggaccgtgcaaggttataaacgcaaaagatgttgacttcatgtacgttgagctcattcagcgctgcaagcagatgttcctcacccagacagacactggtgacgaccgtgtttatcagatgccaagcttcctccagtctgttgcaagcgtcttgctgtaccttgacacagttcctgaggtgtatactccagttctggagcacctcgtggtgatgcagatagacagtttcccacagtacagtccaaaaatgcagctggtgtgttgcagagccatagtgaaggtgttcctagctttggcagcaaaagggccagttctcaggaattgcattagtactgtggtgcatcagggtttaatcagaatatgttctaaaccagtggtccttccaaagggccctgagtctgaatctgaagaccaccgtgcttcaggggaagtcagaactggcaaatggaaggtgcccacatacaaagactacgtggatctcttcagacatctcctgagctctgaccagatgatggattctattttagcagatgaagcatttttctctgtgaattcctccagtgaaagtctgaatcatttactttatgatgaatttgtaaaatccgttttgaagattgttgagaaattggatcttacacttgaaatacagactgttggggaacaagagaatggagatgaggcgcctggtgtttggatgatcccaacttcagatccagcggctaacttgcatccagctaaacctaaagatttttcggctttcattaacctggtggaattttgcagagagattctccctgagaaacaagcagaattttttgaaccatgggtgtactcattttcatatgaattaattttgcaatctacaaggttgcccctcatcagtggtttctacaaattgctttctattacagtaagaaatgccaagaaaataaaatatttcgagggagttagtccaaagagtctgaaacactctcctgaagacccagaaaagtattcttgctttgctttatttgtgaaatttggcaaagaggtggcagttaaaatgaagcagtacaaagatgaacttttggcctcttgtttgacctttcttctgtccttgccacacaacatcattgaactcgatgttagagcctacgttcctgcactgcagatggctttcaaactgggcctgagctatacccccttggcagaagtaggcctgaatgctctagaagaatggtcaatttatattgacagacatgtaatgcagccttattacaaagacattctcccctgcctggatggatacctgaagacttcagccttgtcagatgagaccaagaataactgggaagtgtcagctctttctcgggctgcccagaaaggatttaataaagtggtgttaaagcatctgaagaagacaaagaacctttcatcaaacgaagcaatatccttagaagaaataagaattagagtagtacaaatgcttggatctctaggaggacaaataaacaaaaatcttctgacagtcacgtcctcagatgagatgatgaagagctatgtggcctgggacagagagaagcggctgagctttgcagtgccctttagagagatgaaacctgtcattttcctggatgtgttcctgcctcgagtcacagaattagcgctcacagccagtgacagacaaactaaagttgcagcctgtgaacttttacatagcatggttatgtttatgttgggcaaagccacgcagatgccagaagggggacagggagccccacccatgtaccagctctataagcggacgtttcctgtgctgcttcgacttgcgtgtgatgttgatcaggtgacaaggcaactgtatgagccactagttatgcagctgattcactggttcactaacaacaagaaatttgaaagtcaggatactgttgccttactagaagctatattggatggaattgtggaccctgttgacagtactttaagagatttttgtggtcggtgtattcgagaattccttaaatggtccattaagcaaataacaccacagcagcaggagaagagtccagtaaacaccaaatcgcttttcaagcgactttatagccttgcgcttcaccccaatgctttcaagaggctgggagcatcacttgcctttaataatatctacagggaattcagggaagaagagtctctggtggaacagtttgtgtttgaagccttggtgatatacatggagagtctggccttagcacatgcagatgagaagtccttaggtacaattcaacagtgttgtgatgccattgatcacctatgccgcatcattgaaaagaagcatgtttctttaaataaagcaaagaaacgacgtttgccgcgaggatttccaccttccgcatcattgtgtttattggatctggtcaagtggcttttagctcattgtgggaggccccagacagaatgtcgacacaaatccattgaactcttttataaattcgttcctttattgccaggcaacagatcccctaatttgtggctgaaagatgttctcaaggaagaaggtgtctcttttctcatcaacacctttgaggggggtggctgtggccagccctcgggcatcctggcccagcccaccctcttgtaccttcgggggccattcagcctgcaggccacgctatgctggctggacctgctcctggccgcgttggagtgctacaacacgttcattggcgagagaactgtaggagcgctccaggtcctaggtactgaagcccagtcttcacttttgaaagcagtggctttcttcttagaaagcattgccatgcatgacattatagcagcagaaaagtgctttggcactggggcagcaggtaacagaacaagcccacaagagggagaaaggtacaactacagcaaatgcaccgttgtggtccggattatggagtttaccacgactctgctaaacacctccccggaaggatggaagctcctgaagaaggacttgtgtaatacacacctgatgagagtcctggtgcagacgctgtgtgagcccgcaagcataggtttcaacatcggagacgtccaggttatggctcatcttcctgatgtttgtgtgaatctgatgaaagctctaaagatgtccccatacaaagatatcctagagacccatctgagagagaaaataacagcacagagcattgaggagctttgtgccgtcaacttgtatggccctgacgcgcaagtggacaggagcaggctggctgctgttgtgtctgcctgtaaacagcttcacagagctgggcttctgcataatatattaccgtctcagtccacagatttgcatcattctgttggcacagaacttctttccctggtttataaaggcattgcccctggagatgagagacagtgtctgccttctctagacctcagttgtaagcagctggccagcggacttctggagttagcctttgcttttggaggactgtgtgagcgccttgtgagtcttctcctgaacccagcggtgctgtccacggcgtccttgggcagctcacagggcagcgtcatccacttctcccatggggagtatttctatagcttgttctcagaaacgatcaacacggaattattgaaaaatctggatcttgctgtattggagctcatgcagtcttcagtggataataccaaaatggtgagtgccgttttgaacggcatgttagaccagagcttcagggagcgagcaaaccagaaacaccaaggactgaaacttgcgactacaattctgcaacactggaagaagtgtgattcatggtgggccaaagattcccctctcgaaactaaaatggcagtgctggccttactggcaaaaattttacagattgattcatctgtatcttttaatacaagtcatggttcattccctgaagtctttacaacatatattagtctacttgctgacacaaagctggatctacatttaaagggccaagctgtcactcttcttccattcttcaccagcctcactggaggcagtctggaggaacttagacgtgttctggagcagctcatcgttgctcacttccccatgcagtccagggaatttcctccaggaactccgcggttcaataattatgtggactgcatgaaaaagtttctagatgcattggaattatctcaaagccctatgttgttggaattgatgacagaagttctttgtcgggaacagcagcatgtcatggaagaattatttcaatccagtttcaggaggattgccagaaggggttcatgtgtcacacaagtaggccttctggaaagcgtgtatgaaatgttcaggaaggatgacccccgcctaagtttcacacgccagtcctttgtggaccgctccctcctcactctgctgtggcactgtagcctggatgctttgagagaattcttcagcacaattgtggtggatgccattgatgtgttgaagtccaggtttacaaagctaaatgaatctacctttgatactcaaatcaccaagaagatgggctactataagattctagacgtgatgtattctcgccttcccaaagatgatgttcatgctaaggaatcaaaaattaatcaagttttccatggctcgtgtattacagaaggaaatgaacttacaaagacattgattaaattgtgctacgatgcatttacagagaacatggcaggagagaatcagctgctggagaggagaagactttaccattgtgcagcatacaactgcgccatatctgtcatctgctgtgtcttcaatgagttaaaattttaccaaggttttctgtttagtgaaaaaccagaaaagaacttgcttatttttgaaaatctgatcgacctgaagcgccgctataattttcctgtagaagttgaggttcctatggaaagaaagaaaaagtacattgaaattaggaaagaagccagagaagcagcaaatggggattcagatggtccttcctatatgtcttccctgtcatatttggcagacagtaccctgagtgaggaaatgagtcaatttgatttctcaaccggagttcagagctattcatacagctcccaagaccctagacctgccactggtcgttttcggagacgggagcagcgggaccccacggtgcatgatgatgtgctggagctggagatggacgagctcaatcggcatgagtgcatggcgcccctgacggccctggtcaagcacatgcacagaagcctgggcccgcctcaaggagaagaggattcagtgccaagagatcttccttcttggatgaaattcctccatggcaaactgggaaatccaatagtaccattaaatatccgtctcttcttagccaagcttgttattaatacagaagaggtctttcgcccttacgcgaagcactggcttagccccttgctgcagctggctgcttctgaaaacaatggaggagaaggaattcactacatggtggttgagatagtggccactattctttcatggacaggcttggccactccaacaggggtccctaaagatgaagtgttagcaaatcgattgcttaatttcctaatgaaacatgtctttcatccaaaaagagctgtgtttagacacaaccttgaaattataaagacccttgtcgagtgctggaaggattgtttatccatcccttataggttaatatttgaaaagttttccggtaaagatcctaattctaaagacaactcagtagggattcaattgctaggcatcgtgatggccaatgacctgcctccctatgacccacagtgtggcatccagagtagcgaatacttccaggctttggtgaataatatgtcctttgtaagatataaagaagtgtatgccgctgcagcagaagttctaggacttatacttcgatatgttatggagagaaaaaacatactggaggagtctctgtgtgaactggttgcgaaacaattgaagcaacatcagaatactatggaggacaagtttattgtgtgcttgaacaaagtgaccaagagcttccctcctcttgcagacaggttcatgaatgctgtgttctttctgctgccaaaatttcatggagtgttgaaaacactctgtctggaggtggtactttgtcgtgtggagggaatgacagagctgtacttccagttaaagagcaaggacttcgttcaagtcatgagacatagagatgatgaaagacaaaaagtatgtttggacataatttataagatgatgccaaagttaaaaccagtagaactccgagaacttctgaaccccgttgtggaattcgtttcccatccttctacaacatgtagggaacaaatgtataatattctcatgtggattcatgataattacagagatccagaaagtgagacagataatgactcccaggaaatatttaagttggcaaaagatgtgctgattcaaggattgatcgatgagaaccctggacttcaattaattattcgaaatttctggagccatgaaactaggttaccttcaaataccttggaccggttgctggcactaaattccttatattctcctaagatagaagtgcactttttaagtttagcaacaaattttctgctcgaaatgaccagcatgagcccagattatccaaaccccatgttcgagcatcctctgtcagaatgcgaatttcaggaatataccattgattctgattggcgtttccgaagtactgttctcactccgatgtttgtggagacccaggcctcccagggcactctccagacccgtacccaggaagggtccctctcagctcgctggccagtggcagggcagataagggccacccagcagcagcatgacttcacactgacacagactgcagatggaagaagctcatttgattggctgaccgggagcagcactgacccgctggtcgaccacaccagtccctcatctgactccttgctgtttgcccacaagaggagtgaaaggttacagagagcacccttgaagtcagtggggcctgattttgggaaaaaaaggctgggccttccaggggacgaggtggataacaaagtgaaaggtgcggccggccggacggacctactacgactgcgcagacggtttatgagggaccaggagaagctcagtttgatgtatgccagaaaaggcgttgctgagcaaaaacgagagaaggaaatcaagagtgagttaaaaatgaagcaggatgcccaggtcgttctgtacagaagctaccggcacggagaccttcctgacattcagatcaagcacagcagcctcatcaccccgttacaggccgtggcccagagggacccaataattgcaaaacagctctttagcagcttgttttctggaattttgaaagagatggataaatttaagacactgtctgaaaaaaacaacatcactcaaaagttgcttcaagacttcaatcgttttcttaataccaccttctctttctttccaccctttgtctcttgtattcaggacattagctgtcagcacgcagccctgctgagcctcgacccagcggctgttagcgctggttgcctggccagcctacagcagcccgtgggcatccgcctgctagaggaggctctgctccgcctgctgcctgctgagctgcctgccaagcgagtccgtgggaaggcccgcctccctcctgatgtcctcagatgggtggagcttgctaagctgtatagatcaattggagaatacgacgtcctccgtgggatttttaccagtgagataggaacaaagcaaatcactcagagtgcattattagcagaagccagaagtgattattctgaagctgctaagcagtatgatgaggctctcaataaacaagactgggtagatggtgagcccacagaagccgagaaggatttttgggaacttgcatcccttgactgttacaaccaccttgctgagtggaaatcacttgaatactgttctacagccagtatagacagtgagaaccccccagacctaaataaaatctggagtgaaccattttatcaggaaacatatctaccttacatgatccgcagcaagctgaagctgctgctccagggagaggctgaccagtccctgctgacatttattgacaaagctatgcacggggagctccagaaggcgattctagagcttcattacagtcaagagctgagtctgctttacctcctgcaagatgatgttgacagagccaaatattacattcaaaatggcattcagagttttatgcagaattattctagtattgatgtcctcttacaccaaagtagactcaccaaattgcagtctgtacaggctttaacagaaattcaggagttcatcagctttataagcaaacaaggcaatttatcatctcaagttccccttaagagacttctgaacacctggacaaacagatatccagatgctaaaatggacccaatgaacatctgggatgacatcatcacaaatcgatgtttctttctcagcaaaatagaggagaagcttacccctcttccagaagataatagtatgaatgtggatcaagatggagaccccagtgacaggatggaagtgcaagagcaggaagaagatatcagctccctgatcaggagttgcaagttttccatgaaaatgaagatgatagacagtgcccggaagcagaacaatttctcacttgctatgaaactactgaaggagctgcataaagagtcaaaaaccagagacgattggctggtgagctgggtgcagagctactgccgcctgagccactgccggagccggtcccagggctgctctgagcaggtgctcactgtgctgaaaacagtctctttgttggatgagaacaacgtgtcaagctacttaagcaaaaatattctggctttccgtgaccagaacattctcttgggtacaacttacaggatcatagcgaatgctctcagcagtgagccagcctgccttgctgaaatcgaggaggacaaggctagaagaatcttagagctttctggatccagttcagaggattcagagaaggtgatcgcgggtctgtaccagagagcattccagcacctctctgaggctgtgcaggcggctgaggaggaggcccagcctccctcctggagctgtgggcctgcagctggggtgattgatgcttacatgacgctggcagatttctgtgaccaacagctgcgcaaggaggaagagaatgcatcagttattgattctgcagaactgcaggcgtatccagcacttgtggtggagaaaatgttgaaagctttaaaattaaattccaatgaagccagattgaagtttcctagattacttcagattatagaacggtatccagaggagactttgagcctcatgacaaaagagatctcttccgttccctgctggcagttcatcagctggatcagccacatggtggccttactggacaaagaccaagccgttgctgttcagcactctgtggaagaaatcactgataactacccgcaggctattgtttatcccttcatcataagcagcgaaagctattccttcaaggatacttctactggtcataagaataaggagtttgtggcaaggattaaaagtaagttggatcaaggaggagtgattcaagattttattaatgccttagatcagctctctaatcctgaactgctctttaaggattggagcaatgatgtaagagctgaactagcaaaaacccctgtaaataaaaaaaacattgaaaaaatgtatgaaagaatgtatgcagccttgggtgacccaaaggctccaggcctgggggcctttagaaggaagtttattcagacttttggaaaagaatttgataaacattttgggaaaggaggttctaaactactgagaatgaagctcagtgacttcaacgacattaccaacatgctacttttaaaaatgaacaaagactcaaagccccctgggaatctgaaagaatgttcaccctggatgagcgacttcaaagtggagttcctgagaaatgagctggagattcccggtcagtatgacggtaggggaaagccattgccagagtaccacgtgcgaatcgccgggtttgatgagcgggtgacagtcatggcgtctctgcgaaggcccaagcgcatcatcatccgtggccatgacgagagggaacaccctttcctggtgaagggtggcgaggacctgcggcaggaccagcgcgtggagcagctcttccaggtcatgaatgggatcctggcccaagactccgcctgcagccagagggccctgcagctgaggacctatagcgttgtgcccatgacctccaggttaggattaattgagtggcttgaaaatactgttaccttgaaggaccttcttttgaacaccatgtcccaagaggagaaggcggcttacctgagtgatcccagggcaccgccgtgtgaatataaagattggctgacaaaaatgtcaggaaaacatgatgttggagcttacatgctaatgtataagggcgctaatcgtactgaaacagtcacgtcttttagaaaacgagaaagtaaagtgcctgctgatctcttaaagcgggccttcgtgaggatgagtacaagccctgaggctttcctggcgctccgctcccacttcgccagctctcacgctctgatatgcatcagccactggatcctcgggattggagacagacatctgaacaactttatggtggccatggagactggcggcgtgatcgggatcgactttgggcatgcgtttggatccgctacacagtttctgccagtccctgagttgatgccttttcggctaactcgccagtttatcaatctgatgttaccaatgaaagaaacgggccttatgtacagcatcatggtacacgcactccgggccttccgctcagaccctggcctgctcaccaacaccatggatgtgtttgtcaaggagccctcctttgattggaaaaattttgaacagaaaatgctgaaaaaaggagggtcatggattcaagaaataaatgttgctgaaaaaaattggtacccccgacagaaaatatgttacgctaagagaaagttagcaggtgccaatccagcagtcattacttgtgatgagctactcctgggtcatgagaaggcccctgccttcagagactatgtggctgtggcacgaggaagcaaagatcacaacattcgtgcccaagaaccagagagtgggctttcagaagagactcaagtgaagtgcctgatggaccaggcaacagaccccaacatccttggcagaacctgggaaggatgggagccctggatgtgaggtctgtgggagtctgcagatagaaagcattacattgtttaaagaatctactatactttggttggcagcattccatgagctgattttcctgaaacactaaagagaaatgtcttttgtgctacagtttcgtagcatgagtttaaatcaagattatgatgagtaaatgtgtatgggttaaatcaaagataaggttatagtaacatcaaagattaggtgaggtttatagaaagatagatatccaggcttaccaaagtattaagtcaagaatataatatgtgatcagctttcaaagcatttacaagtgctgcaagttagtgaaacagctgtctccgtaaatggaggaaatgtggggaagccttggaatgcccttctggttctggcacattggaaagcacactcagaaggcttcatcaccaagattttgggagagtaaagctaagtatagttgatgtaacattgtagaagcagcataggaacaataagaacaataggtaaagctataattatggcttatatttagaaatgactgcatttgatattttaggatatttttctaggttttttcctttcattttattctcttctagttttgacattttatgatagatttgctctctagaaggaaacgtctttatttaggagggcaaaaattttggtcatagcattcacttttgctattccaatctacaactggaagatacataaaagtgctttgcattgaatttgggataacttcaaaaatcccatggttgttgttagggatagtactaagcatttcagttccaggagaataaaagaaattcctatttgaaatgaattcctcatttggaggaaaaaaagcatgcattctagcacaacaagatgaaattatggaatacaaaagtggctccttcccatgtgcagtccctgtccccccccgccagtcctccacacccaaactgtttctgattggcttttagctttttgttgtttttttttttccttctaacacttgtatttggaggctcttctgtgattttgagaagtatactcttgagtgtttaataaagtttttttccaaaagta

SEQ ID NO: 20 - protein, 4128 aa, Homo sapiens [sequence omitted]

SEQ ID NO: 21 - DNA, 3279 bp, Homo sapiens
  CDS (332)..(3025)
gacgtcgcgcgggctcccgggcggggcgggtccggccgcctccgagcccggccggcagcccccggccttaaagcgcgggctgtccggaggggtcggctttcccaccgaggatttggcactctggtgagggaaaagggcgaaagagaaaagcgagcagccgtcctttcacagcctcagaaagtgctcgcttcccttcgggggctttcgcgaatcccgaggcaatctcggaggcggtatttgacctgtccaaagacgacttgatacctctataatgtaacagaaaaggtcagaaaatattaagcaagtagaagtgtggagcatattaagcaagatgaacatctcgggaagcagctgtggaagccctaactctgcagatacatctagtgactttaaggacctttggacaaaactaaaagaatgtcatgatagagaagtacaaggtttacaagtaaaagtaaccaagctaaaacaggaacgaatcttagatgcacaaagactagaagaattcttcaccaaaaatcaacagctgagggaacagcagaaagtccttcatgaaaccattaaagttttagaagatcggttaagagcaggcttatgtgatcgctgtgcagtaactgaagaacatatgcggaaaaaacagcaagagtttgaaaatatccggcagcagaatcttaaacttattacagaacttatgaatgaaaggaatactctacaggaagaaaataaaaagctttctgaacaactccagcagaaaattgagaatgatcaacagcatcaagcagctgagcttgaatgtgaggaagacgttattccagattcaccgataacagccttctcattttctggcgttaaccggctacgaagaaaggagaacccccatgtccgatacatagaacaaacacatactaaattggagcactctgtgtgtgcaaatgaaatgagaaaagtttccaagtcttcaactcatccacaacataatcctaatgaaaatgaaattctagtagctgacacttatgaccaaagtcaatctccaatggccaaagcacatggaacaagcagctatacccctgataagtcatcttttaatttagctacagttgttgctgaaacacttggacttggtgttcaagaagaatctgaaactcaaggtcccatgagcccccttggtgatgagctctaccactgtctggaaggaaatcacaagaaacagccttttgaggaatctacaagaaatactgaagatagtttaagattttcagattctacttcaaagactcctcctcaagaagaattacctactcgagtgtcatctcctgtatttggagctacctctagtatcaaaagtggtttagatttgaatacaagtttgtccccttctcttttacagcctgggaaaaaaaaacatctgaaaacactcccttttagcaacacttgtatatctagattagaaaaaactagatcaaaatctgaagatagtgcccttttcacacatcacagtcttgggtctgaagtgaacaagatcattatccagtcatctaataaacagatacttataaataaaaatataagtgaatccctaggtgaacagaataggactgagtacggtaaagattctaacactgataaacatttggagcccctgaaatcattgggaggccgaacatccaaaaggaagaaaactgaggaagaaagtgaacatgaagtaagctgcccccaagcttcttttgataaagaaaatgctttcccttttccaatggataatcagttttccatgaatggagactgtgtgatggataaacctctggatctgtctgatcgattttcagctattcagcgtcaagagaaaagccaaggaagtgagacttctaaaaacaaatttaggcaagtgactctttatgaggctttgaagaccattccaaagggcttttcctcaagccgtaaggcctcagatggcaactgcacgttgcccaaagattccccaggggagccctgttcacaggaatgcatcatccttcagcccttgaataaatgctctccagacaataaaccatcattacaaataaaagaagaaaatgctgtctttaaaattcctctacgtccacgtgaaagtttggagactgagaatgttttagatgacataaagagtgctggttctcatgagccaataaaaatacaaaccaggtcagaccatggaggatgtgaacttgcatcagttcttcagttaaatccatgtagaactggtaaaataaagtctctacaaaacaaccaagatgtatcctttgaaaatatccagtggagtatagatccgggagcagacctttctcagtataaaatggatgttactgtaatagatacaaaggatggcagtcagtcaaaattaggaggagagacagtggacatggactgtacattggttagtgaaaccgttctcttaaaaatgaagaagcaagagcagaagggagaaaaaagttcaaatgaagaaagaaaaatgaatgatagcttggaagatatgtttgatcggacaacacatgaagagtatgaatcctgtttggcagacagtttctcccaagcagcagatgaagaggaggaattgtctactgccacaaagaaactacacactcatggtgataaacaagacaaagtcaagcagaaagcgtttgtggagccgtattttaaaggtgatgaaagagagactagcttgcaaaattttcctcatattgaggtggttcggaaaaaagaggagagaagaaaactgcttgggcacacgtgtaaggaatgtgaaatttattatgcagatatgccagcagaagaaagagaaaagaaattggcttcctgctcaagacaccgattccgctacattccacccaacacaccagagaatttttgggaagttggttttccttccactcagacttgtatggaaagaggttatattaaggaagatcttgatccttgtcctcgtccaaaaagacgtcagccttacaacgcaatattttctccaaaaggcaaggagcagaagacatagacgttgaaacagaaacagaaggatgaaggacagttttttccttcttagttatttatagttaaagttggtactaaacattgatttttttgatcttctgtaaatggatttataaatcagttttctattgaaaatgtttgtgatattttgcttttgcacctttaaaacaataaggcgctttcattttgcactctaacttaagagtttttactttatgtagtgatacctaatacaattttgaaaatacaaaaaaaaaa

SEQ ID NO: 22 - protein, 897 aa, Homo sapiens
MNISGSSCGSPNSADTSSDFKDLWTKLKECHDREVQGLQVKVTKLKQERILDAQRLEEFFTKNQQLREQQKVLHETIKVLEDRLRAGLCDRCAVTEEHMRKKQQEFENIRQQNLKLITELMNERNTLQEENKKLSEQLQQKIENDQQHQAAELECEEDVIPDSPITAFSFSGVNRLRRKENPHVRYIEQTHTKLEHSVCANEMRKVSKSSTHPQHNPNENEILVADTYDQSQSPMAKAHGTSSYTPDKSSFNLATVVAETLGLGVQEESETQGPMSPLGDELYHCLEGNHKKQPFEESTRNTEDSLRFSDSTSKTPPQEELPTRVSSPVFGATSSIKSGLDLNTSLSPSLLQPGKKKHLKTLPFSNTCISRLEKTRSKSEDSALFTHHSLGSEVNKIIIQSSNKQILINKNISESLGEQNRTEYGKDSNTDKHLEPLKSLGGRTSKRKKTEEESEHEVSCPQASFDKENAFPFPMDNQFSMNGDCVMDKPLDLSDRFSAIQRQEKSQGSETSKNKFRQVTLYEALKTIPKGFSSSRKASDGNCTLPKDSPGEPCSQECIILQPLNKCSPDNKPSLQIKEENAVFKIPLRPRESLETENVLDDIKSAGSHEPIKIQTRSDHGGCELASVLQLNPCRTGKIKSLQNNQDVSFENIQWSIDPGADLSQYKMDVTVIDTKDGSQSKLGGETVDMDCTLVSETVLLKMKKQEQKGEKSSNEERKMNDSLEDMFDRTTHEEYESCLADSFSQAADEEEELSTATKKLHTHGDKQDKVKQKAFVEPYFKGDERETSLQNFPHIEVVRKKEERRKLLGHTCKECEIYYADMPAEEREKKLASCSRHRFRYIPPNTPENFWEVGFPSTQTCMERGYIKEDLDPCPRPKRRQPYNAIFSPKGKEQKT

SEQ ID NO: 23 - DNA, 3520 bp, Homo sapiens
  CDS (221)..(1495)
aattcccagcaggccttgggcctcagtgcggccgcgaagcagagcgggctgtagagccttgcgcgcgcagtggggatggaacgttgctaggcttagcgggtctggctgctgggggcccgagcagcacgctcggagccgccgcgcgccaaagcgggaatctgggaggcgagcagctctgcagttaatgcacgtattttaaactcccgggcctgcggacgctatgcacaggaagcacctccaggagattccagacctgagtagcaacgttgccaccagcttcacgtggggatgggattccagcaagacttctgaactgctgtcaggcatgggggtctccgccctggagaaagaggagcccgacagtgagaacatcccccaggaactgctctcaaacctgggccacccggagagccccccacggaaacggctgaagagcaaagggagtgacaaagactttgtgattgtccgcaggcctaagctaaatcgagagaactttccaggtgtttcatgggactcccttccggatgagctgctcttgggaatcttttcctgtctgtgcctccctgagctgctaaaggtctctggtgtttgtaagaggtggtatcgcctagcgtctgatgagtctctatggcagaccttagacctcacaggtaaaaatctgcacccggatgtgactggtcggttgctgtctcaaggggtgattgccttccgctgcccacgatcatttatggaccaaccattggctgaacatttcagcccttttcgtgtacagcacatggacctatcgaactcagttatagaagtgtccaccctccacggcatactgtctcagtgttccaagttgcagaatctaagcctggaaggcctgcggctttcggatcccattgtcaatactctcgcaaaaaactcaaatttagtgcgacttaacctttctgggtgttctggattctctgaatttgccctgcagactttgctaagcagctgttccagactggatgagctgaacctctcctggtgttttgatttcactgaaaagcatgtacaggtggctgttgcgcatgtgtcagagaccatcacccagctgaatcttagcggctacagaaagaatctccagaaatcagatctctctactttagttagaagatgccccaatcttgtccatctagacttaagtgatagtgtcatgctaaagaatgactgctttcaggaatttttccagctcaactacctccaacacctatcactcagtcggtgctatgatataatacctgaaactttacttgaacttggagaaattcccacactaaaaacactacaagtttttggaatcgtgccagatggtacccttcaactgttaaaggaagcccttcctcatctacagattaattgctcccatttcaccaccattgccaggccaactattggcaacaaaaagaaccaggagatatggggcatcaaatgccgactgacactgcaaaagcccagttgtctatgaagtatttattgcaggatggtgtctcttctttagaacagggaaaataggcaggaagcccaattgctggagtacttagctagttttattcttggttttccctttgccttcattctgcaagtatactagggagccatttgagagggaaaactatgaaatcttgctttttgaaatgattctaaaagcttctatcactgctttgctcttaagagccaaagttgtaggccttttgaaattttaggagagtgagcctataatttcaagataccttaaagagcaaaatttgagccacctcttccaagtgcccttcttactaagtctattcagaatcaagcttaaaaattaccaccagcaaacaatcttcatagcccatataacttttatctatttaattttatagtattgctttataagacagcttagaagaacaataagctatttgtattatgagctgaacaaaaagagaatcataggatagtagcgtctgaggccatcttttctaggaataggaaagagaaaaatgtatttgaattttgcctttagatttgaaattaggttaatagaaataagtaaccccatgtaattcaccttaaaacttaacaaaagaccaaacattacaaaacccagagatatagaatcaatataggatttgaaggcccagcagacagttttctatgacaggttaatctgaagtatcctgtaatgttcattaagttactgtgtttccagaatctaaattagatgagaaatataattgtggttttctaacttgataatcaaattatgttaacatgggtcctttagcttttaaaatgacttgctttgttttagaaaggtggtattaatccactctctattcttgaaaatttggatgggagaattctgaagttgcctgctgttttcctttagcgctgaggttcttaaggttacttttatattactctggaatcaagtattttaaattgtattttttttttaaatgatctctcagcaataattgtttgaaactatccatatataaggttatcagacctacagttccctaagaggaactgcatgttctcttcaatcagaaatatacagtagaagcaggtatatcttccatgcagtttcagtagtaagcactacttatacctacataagagttaaaatccagatgtgggaccttttgataccatcagtgatatatatttttttaaactggtacagagaagtgaaaagattaaattctacttctattttttttttttttttttgagacggagtctcgctctgtcaccaaggccggagtgcagtggtgcgatctcggctcactgcaagctccgcctcccaggttcacgtcattctcctgcctcagcctcccgactagctgggactacaggcgcccaccaccacgcccggctaatttttttgtatttttagtagagacggggtttcaccatgttagccaggatggtctcaatctcctgacctcatgatccgcccgtcttggcctcccaaagtgctgggattacaggcatgagcaactgcgcccagccaaattctacttcttaaaaatcacaaaaactagtttaaattgatgacttgttcgtatgttcaaaatgtaacaacaaaaaaagctaacaccagtcatttatattaactttttttttttaaatcaaaaattgttaatgttagaaacatactatgaagtgcctttatctgcttagacctaaggaagattttaaagttgggttgcacaggaaatgatgatgcttcaatttcttaatagttaaaaagtgctaaatactacttgaaattattgtttacagattagtgacaagagctggggttaggatccggttggactctgacatcggatgccctcaaacatacagaacttccaaactcaagtccagccataagctattttgccaacatgtcagagtaatctgtatttttgtatgtgatttctacttttatagacttgttttaaaacaataaaacacatttttataaaaatgagtgcttaaaaaaaaaaaaaaaaaa

SEQ ID NO: 24 - protein, 424 aa, Homo sapiens
MHRKHLQEIPDLSSNVATSFTWGWDSSKTSELLSGMGVSALEKEEPDSENIPQELLSNLGHPESPPRKRLKSKGSDKDFVIVRRPKLNRENFPGVSWDSLPDELLLGIFSCLCLPELLKVSGVCKRWYRLASDESLWQTLDLTGKNLHPDVTGRLLSQGVIAFRCPRSFMDQPLAEHFSPFRVQHMDLSNSVIEVSTLHGILSQCSKLQNLSLEGLRLSDPIVNTLAKNSNLVRLNLSGCSGFSEFALQTLLSSCSRLDELNLSWCFDFTEKHVQVAVAHVSETITQLNLSGYRKNLQKSDLSTLVRRCPNLVHLDLSDSVMLKNDCFQEFFQLNYLQHLSLSRCYDIIPETLLELGEIPTLKTLQVFGIVPDGTLQLLKEALPHLQINCSHFTTIARPTIGNKKNQEIWGIKCRLTLQKPSCL

SEQ ID NO: 25 - DNA, 4562 bp, Homo sapiens
  CDS (129)..(2756)
ggttggaattttggcgggttcagctgtgaacgaagaaggcgtcccggcatcggccaagattctacattgctcatctgggcatctgagcctccttcgaagtttcctgtcacaactgtcctcttgacagcatggatgaggaggaagacaatctgtctctgctgaccgcactgctggaagaaaatgagtcagccttggattgtaattcagaagaaaataacttcttgacgcgggaaaatggcgagcccgacgcatttgatgagctctttgatgccgacggcgacggtgaatcttatacagaagaggctgatgatggagaaacaggagagacaagagacgaaaaggaaaatctggccactctctttggagatatggaggacttaacagatgaagaagaagttcccgcatcacagtcaactgaaaatagggtcctccctgctcctgcccccaggcgagagaaaacgaatgaagagttgcaagaggaattaaggaatttgcaagagcaaatgaaggccttacaagagcagctaaaagtaacaacaattaaacagacagcaagcccagcccgtctgcaaaaatcccctgtagagaagtctccccggccacctcttaaggagaggagagttcagagaattcaggagtcaacatgcttttctgcggagcttgatgtccctgcgctaccaagaaccaagagggtggctcgaacaccaaaggcttcacctccagatcccaaaagctcatcttcaaggatgacaagtgcaccctcccaacccctacagacgatttctcggaacaaacctagtgggataactagaggtcaaattgtggggaccccaggaagttctggggaaacgactcaacccatctgtgtggaagccttctctggtctgcggctcaggcggcctcgagtatcctccacagaaatgaacaagaaaatgaccggccgaaaactgatcagactgtctcagatcaaggaaaagatggccagagagaagctggaagaaatagattgggtgacatttggggttatattgaagaaggttacgccacagagtgtgaatagtggaaaaaccttcagcatatggaaactgaatgatcttcgtgacctgacacaatgtgtgtccttgttcttatttggagaagttcacaaagcgctctggaagacggagcaggggactgtcgtagggatcctcaatgccaaccccatgaagcccaaggatggttcagaggaggtgtgtttatctatcgatcatcctcagaaggtcttaattatgggtgaagctcttgacctgggaacctgtaaagccaagaagaagaatggagagccgtgcacgcagactgtgaatttgcgtgactgtgagtactgtcagtaccatgtccaggctcagtacaagaagctcagcgcaaagcgtgcggatctgcagtccaccttctctggaggacgaattccaaagaagtttgcccgcagaggcaccagcctcaaagaacggctgtgccaagatggcttttactacggaggggtttcttctgcctcgtatgcagcttcaattgcagcagctgtggctcctaagaagaagattcaaaccactctgagtaatctggttgttaagggcacaaacttgatcatccaggaaacacggcaaaaactcggaataccccagaagagcctgtcttgctctgaggagttcaaggaactgatggacctgccgacgtgtggagccaggaacttaaaacaacatttagccaaagccacagcttcagggattatggggagcccaaaaccagccatcaagtccatctcggcctcagcactcttgaagcaacagaagcagcggatgttggagatgaggagaaggaaatcagaagaaatacagaagcgatttctgcagagctcaagtgaagttgagagcccagctgtgccatcttcatcaagacagccccctgctcagcctccacggacaggatccgagttccccaggctggagggagccccggccacaatgacgcccaagctggggcgaggtgtcttggaaggagatgatgttctcttttatgatgagtcaccaccaccaagaccaaaactgagtgctttagcagaagccaaaaagttagctgctatcaccaaattaagggcaaaaggccaggttcttacaaaaacaaacccaaacagcattaagaagaaacaaaaggaccctcaggacatcctggaggtgaaggaacgtgtagaaaaaaacaccatgttttcttctcaagctgaggatgaattggagcctgccaggaaaaaaaggagagaacaacttgcctatctggaatctgaggaatttcagaaaatcctaaaagcaaaatcaaaacacacaggcatcctgaaagaggccgaggctgagatgcaggagcgctactttgagccactggtgaaaaaagaacaaatggaagaaaagatgagaaacatcagagaagtgaagtgccgtgtcgtgacatgcaagacgtgcgcctatacccacttcaagctgctggagacctgcgtcagtgagcagcatgaataccactggcatgatggtgtgaagaggtttttcaaatgtccctgtggaaacagaagcatctccttggacagactcccgaacaagcactgcagtaactgtggcctctacaaatgggaacgggacggaatgctaaaggaaaagactggtccaaagataggaggagaaactctgttaccaagaggagaagaacatgctaaatttctgaacagccttaaataacccgaacttcagacattttcccacagacttcctggcctcctgtgactctggaaagcaaaggattggctgtgtattgtccattgattcctgattgacgccgtcaaaaacaaatgcttgttaagcccataagctttgcctgcttactttctgccattgggttggtttgataccacatttaacattgacatttaagtggaaaaccaagttatcattgtcttttctaagctcagtgtggatgattgcattacttcattcactgaagtttttgcccaaaaattggaaggtaaacagagagctatgtttctgtatcttttggttatagagtgttcacttctttatcataacaaaattctagtgtttatacgaacacccagaggcaaaagaatttggcttaattctcactccaggtaagtagcttaacttctgggcttcagttttctcatctgtaaaatcaggaagattggactaagtgatcctgaaatgtattttttagcactggatttctacaaataataaaactttcccatctagataatgatgatcacatagtcttgatgtacggacattaaaagccagatttcttcattcaattctgttatctctgttttactctttgaaattgatcaagccactgaatcactttgcatttcagtttatatatatagagagaaagaaggtgtctgctcttacattattgtggagccctgtgatagaaatatgtaaaatctcatattattttttttttaatttttttattttttatgacagggtctcactatgtcaccctggctggagtgcagtagtgcgatcgcggcacactgcagccttggcttccctgggctcaagcagtcctcccacctcagtctcccaaatagctaggactacaggcgtgcgtgaccaagcccagctaatttttgcattttttgtagagatggggttttgccatgttgctcaggctggtctcaaactcctgagcactagcaatccacccacctctgtttccaaaaaaaaaaaaaaaatgaaaggtcaacccctatgcaaattaccacagcaaaggtttcattcaggagattcttccatctgggcaacctggttttccaaatatcatttgacctaagtgaatgttgatactagctaaagattgggtaaattggttgaattattgtattgaagcttgagctgtagctaaaagtaatttaggtttcccctaagatgttattatgttagggacataacacttttgggaggttgttgtgggagatggttgatttaggttttcaaaagctagaaataaaatttacatgccttagatttcataaaattctgctctaattgggtggaaggtgctgtatctaacttgtgttcctcctaaggttatgtcctaataactattcttttaggagtatacttctactttatagaaggttgcttttctttttaattttttctaacaaagaaaagaataaagtatttattaataagaaccagaaagcacttgaaactgatgtttttaatggctcatttagggtagatttatttatctcattaacttaaaacagctatgtgtatgaaataggtcacaacagaacttgaacaccaggttggtgtctgagcaatccctttcttatgggaaaaacaatgttcttgtttgaacagagggtatcattgcagtcagtattcacgtgtatattgttatataagttgtataatatgcttgtaaaggctgagggtgagctgtatctggatgcctttttacaatttgattttaacttttaaaataaatttaaaacataaaaaaaaaaaaaa

SEQ ID NO: 26 - protein, 875 aa, Homo sapiens
MDEEEDNLSLLTALLEENESALDCNSEENNFLTRENGEPDAFDELFDADGDGESYTEEADDGETGETRDEKENLATLFGDMEDLTDEEEVPASQSTENRVLPAPAPRREKTNEELQEELRNLQEQMKALQEQLKVTTIKQTASPARLQKSPVEKSPRPPLKERRVQRIQESTCFSAELDVPALPRTKRVARTPKASPPDPKSSSSRMTSAPSQPLQTISRNKPSGITRGQIVGTPGSSGETTQPICVEAFSGLRLRRPRVSSTEMNKKMTGRKLIRLSQIKEKMAREKLEEIDWVTFGVILKKVTPQSVNSGKTFSIWKLNDLRDLTQCVSLFLFGEVHKALWKTEQGTVVGILNANPMKPKDGSEEVCLSIDHPQKVLIMGEALDLGTCKAKKKNGEPCTQTVNLRDCEYCQYHVQAQYKKLSAKRADLQSTFSGGRIPKKFARRGTSLKERLCQDGFYYGGVSSASYAASIAAAVAPKKKIQTTLSNLVVKGTNLIIQETRQKLGIPQKSLSCSEEFKELMDLPTCGARNLKQHLAKATASGIMGSPKPAIKSISASALLKQQKQRMLEMRRRKSEEIQKRFLQSSSEVESPAVPSSSRQPPAQPPRTGSEFPRLEGAPATMTPKLGRGVLEGDDVLFYDESPPPRPKLSALAEAKKLAAITKLRAKGQVLTKTNPNSIKKKQKDPQDILEVKERVEKNTMFSSQAEDELEPARKKRREQLAYLESEEFQKILKAKSKHTGILKEAEAEMQERYFEPLVKKEQMEEKMRNIREVKCRVVTCKTCAYTHFKLLETCVSEQHEYHWHDGVKRFFKCPCGNRSISLDRLPNKHCSNCGLYKWERDGMLKEKTGPKIGGETLLPRGEEHAKFLNSLK

SEQ ID NO: 27 - DNA, 1405 bp, Homo sapiens
  CDS (88)..(831)
tttcccggcgtccatttagtggcgggaaaagcgaccttttctgagcgcgtttgcctgttgagtggtagcctttcccctcaaccagcaatggaggagcagccccagatgcaagacgccgacgagcccgcggactccggaggggaaggccgggcaggcgggccaccgcaggtcgccggcgcccaggcggcgtgcagcgaggaccgcatgaccctgctcctcaggctgagagcacagacaaaacaacaactcttagaatataaatcaatggttgatgcaagtgaagaaaaaactccagaacaaattatgcaagaaaagcaaatcgaagctaaaattgaagacctggaaaatgaaattgaagaggtaaaagttgcttttgagataaaaaagcttgcattagacaggatgagactttcaactgcacttaaaaaaaacctggagaaaattagcagacagtctagtgtgctcatggataacatgaaacacctattagagctaaataaattaataatgaaatcacagcaggaatcttgggatttagaggaaaaactgcttgatattagaaagaagagattgcaattaaaacaagcttcagaaagtaagcttttagaaatacagactgaaaagaacaaacagaagattgatttggacagtatggaaaactcagagaggataaagatcatacgacaaaacctacagatggagataaaaattactactgttattcaacatgtgttccagaaccttattttggggagtaaagtcaattgggcagaggatcctgcccttaaggaaattgttctgcagcttgagaagaatgttgacatgatgtaataagaattcatttctgacatattttacatttctggcaatctcaactcttatttggaatacttctgtgcatttgtctgtccaccgtaattttagaaaagcatatccataacgtttacagttgtagtacagttgtggttagttatttgtagtgggattgaaagtaatttttttctttttatatttctatatttagtttgtttttttgttgttgttgttttttgagatggagtctcgctttgttgcccagactggagggcagtggcgcgatctcggctcactgcaacctctgcctcccgggttcaagcagttctgcctcagcctcccaagtagctgtgactaaaggtgcacgccgccatgcccagctaattttttgtattttagtagagacggggtttcaccgtgttgcccaggctgctctcagaactcctgagctcaggcagtccaccgcctcggcctaccgaagtgctaggattacagacgtaagccaccgagcctggtctagtttgcattttttttctatcagttttataagttaagaaataaaaggaattaatgttaaaaaaaaaaaaaaaaa

SEQ ID NO: 28 - protein, 247 aa, Homo sapiens
MEEQPQMQDADEPADSGGEGRAGGPPQVAGAQAACSEDRMTLLLRLRAQTKQQLLEYKSMVDASEEKTPEQIMQEKQIEAKIEDLENEIEEVKVAFEIKKLALDRMRLSTALKKNLEKISRQSSVLMDNMKHLLELNKLIMKSQQESWDLEEKLLDIRKKRLQLKQASESKLLEIQTEKNKQKIDLDSMENSERIKIIRQNLQMEIKITTVIQHVFQNLILGSKVNWAEDPALKEIVLQLEKNVDMM

SEQ ID NO: 29 - DNA, 3109 bp, Homo sapiens
  CDS (278)..(2614)
gggggccggccagaaacgggctggggagggggggccccgcagcccccctgggccatgctgactcccggggcctgacccccccgggccagccccccctcccccagctccgcggcccgccgactggggggggccagcccagccccctggggacccccggagaggtggggggcagccgggggggccgggacggagcggtcgccggcccccaccggagagacggggcgacggccgcagggggggcggccgggggaccggtcgggccgggaccaagggcaccatgtcgtccggggccaaggagggaggtgggggctctcccgcctaccacctcccccacccccacccccacccaccccagcacgcccaatatgtgggcccctatcggctggagaagacgctgggcaaaggacagacagggctggttaaactcggggtccactgcatcacgggtcagaaggtcgccatcaagatcgtgaaccgggagaagctgtcggagtcggtgctgatgaaggtggagcgggagatcgccatcctgaagctcatcgaacacccacatgtcctcaagctccacgacgtctacgagaacaagaaatatttgtacctggttctggagcacgtctcggggggtgagctattcgactacctggtaaagaaggggagactgacgcccaaggaggcccgaaagttcttccgccagattgtgtctgcgctggacttctgccacagctactccatctgccacagagacctaaagcccgagaacctgcttttggatgagaaaaacaacatccgcattgcagacttcggcatggcgtccctgcaggtgggggacagcctcctggagaccagctgcgggtccccccattatgcgtgtccagaggtgattaagggggaaaaatatgatggccgccgggcagacatgtggagctgtggagtcatcctcttcgccctgctcgtgggggctctgccctttgatgacgacaacctccgccagctgctggagaaggtgaaacggggcgtcttccacatgccccacttcattcctccagattgccagagcctcctgaggggaatgatcgaagtggagcccgaaaaaaggctcagtctggagcaaattcagaaacatccttggtacctaggcgggaaacacgagccagacccgtgcctggagccagcccctggccgccgggtagccatgcggagcctgccatccaacggagagctggaccccgacgtcctagagagcatggcatcactgggctgcttcagggaccgcgagaggctgcatcgcgagctgcgcagtgaggaggagaaccaagaaaagatgatatattatctgcttttggatcggaaggagcggtatcccagctgtgaggaccaggacctgcctccccggaatgatgttgaccccccccggaagcgtgtggattctcccatgctgagccgtcacgggaagcggcgaccagagcggaagtccatggaagtcctgagcatcaccgatgccgggggtggtggctcccctgtacccacccgacgggccttggagatggcccagcacagccagagatcccgtagcgtcagtggagcctccacgggtctgtcctccagccctctaagcagcccaaggagtccggtcttttccttttcaccggagccgggggctggagatgaggctcgaggcgggggctccccgacttccaaaacgcagacgctgccttctcggggccccaggggtgggggcgccggggagcagcccccgccccccagtgcccgctccacacccctgcccggccccccaggctccccgcgctcctctggcgggacccccttgcactcgcctctgcacacgccccgggccagtcccaccgggaccccggggacaacaccaccccccagccccggcggtggcgtcgggggagccgcctggaggagtcgtctcaactccatccgcaacagcttcctgggctcccctcgctttcaccggcgcaagatgcaggtccctaccgctgaggagatgtccagcttgacgccagagtcctccccggagctggcaaaacgctcctggttcgggaacttcatctccttggacaaagaagaacaaatattcctcgtgctaaaggacaaacctctcagcagcatcaaagcagacatcgtccatgcctttctgtcgatccccagcctgagtcacagtgtgctgtcacagaccagcttcagggccgagtacaaggccagtggcggcccctccgtcttccaaaagcccgtccgcttccaggtggacatcagctcctctgagggtccagagccctccccgcgacgggacggcagcggaggtggtggcatctactccgtcaccttcactctcatctcgggtcccagccgtcggttcaagcgagtggtggagaccatccaggcacagctcctgagcactcatgaccagccctccgtgcaggccctggcagacgagaagaacggggcccagacccggcctgctggtgccccaccccgaagcctgcagcccccacccggccgcccagacccagagctgagcagctctccccgccgaggcccccccaaggacaagaagctcctggccaccaacgggacccctctgccctgaccccacggggccggggagggaggggacccccctccaccccccttccgtgccccccaactgtgaatctgtaaataaggcccaaggaacatgtcgggaggggggtggacacaaaaaccggccttgccctgcagggatggggctccacaggccgtgcccaactgggggtggttctaggggaacagggggcgggggagctgtttctattttatttattgattaatttattattttatttattgatcaatctctctgcggggtggggtgggggagggacgggagctggttggggtggcttagcagatccggacagggccctctgtccctgtgtcgtccccaaccccctcttcccgggcccctcctcccctggtcctccccccacgaccttctgtacggatttgctctccggaaggaattctggtttcgcgtgatcctgcctgcgtccgtgtctctgattccgccggcggcaaaaaaaaaaaaaaaaaaaaaaaaaaaaaa

SEQ ID NO: 30 - protein, 778 aa, Homo sapiens
MSSGAKEGGGGSPAYHLPHPHPHPPQHAQYVGPYRLEKTLGKGQTGLVKLGVHCITGQKVAIKIVNREKLSESVLMKVEREIAILKLIEHPHVLKLHDVYENKKYLYLVLEHVSGGELFDYLVKKGRLTPKEARKFFRQIVSALDFCHSYSICHRDLKPENLLLDEKNNIRIADFGMASLQVGDSLLETSCGSPHYACPEVIKGEKYDGRRADMWSCGVILFALLVGALPFDDDNLRQLLEKVKRGVFHMPHFIPPDCQSLLRGMIEVEPEKRLSLEQIQKHPWYLGGKHEPDPCLEPAPGRRVAMRSLPSNGELDPDVLESMASLGCFRDRERLHRELRSEEENQEKMIYYLLLDRKERYPSCEDQDLPPRNDVDPPRKRVDSPMLSRHGKRRPERKSMEVLSITDAGGGGSPVPTRRALEMAQHSQRSRSVSGASTGLSSSPLSSPRSPVFSFSPEPGAGDEARGGGSPTSKTQTLPSRGPRGGGAGEQPPPPSARSTPLPGPPGSPRSSGGTPLHSPLHTPRASPTGTPGTTPPPSPGGGVGGAAWRSRLNSIRNSFLGSPRFHRRKMQVPTAEEMSSLTPESSPELAKRSWFGNFISLDKEEQIFLVLKDKPLSSIKADIVHAFLSIPSLSHSVLSQTSFRAEYKASGGPSVFQKPVRFQVDISSSEGPEPSPRRDGSGGGGIYSVTFTLISGPSRRFKRVVETIQAQLLSTHDQPSVQALADEKNGAQTRPAGAPPRSLQPPPGRPDPELSSSPRRGPPKDKKLLATNGTPLP

SEQ ID NO: 31 - DNA, 21 bp, Artificial
  Combined DNA/RNA molecule: Synthetic oligonucleotide
  misc_RNA (1)..(19): RNA
gggaggcaagaccuucauutt

SEQ ID NO: 32 - DNA, 21 bp, Artificial
  Combined DNA/RNA molecule: Synthetic oligonucleotide
  misc_RNA (1)..(19): RNA
aaugaaggucuugccuccctg

SEQ ID NO: 33 - DNA, 21 bp, Artificial
  Combined DNA/RNA molecule: Synthetic oligonucleotide
  misc_RNA (1)..(19): RNA
uccuaagagugcugggcautt

SEQ ID NO: 34 - DNA, 21 bp, Artificial
  Combined DNA/RNA molecule: Synthetic oligonucleotide
  misc_RNA (1)..(19): RNA
augcccagcacucuuaggatt

SEQ ID NO: 35 - DNA, 21 bp, Artificial
  Combined DNA/RNA molecule: Synthetic oligonucleotide
  misc_RNA (1)..(19): RNA
acgugacacguucggagaatt

SEQ ID NO: 36 - DNA, 21 bp, Artificial
  Combined DNA/RNA molecule: Synthetic oligonucleotide
  misc_RNA (1)..(19): RNA
uucuccgaacgugucacgutt

SEQ ID NO: 37 - DNA, 21 bp, Artificial
  Combined DNA/RNA molecule: Synthetic oligonucleotide
  misc_RNA (1)..(19): RNA
ucucccucaucuacaccaatt

SEQ ID NO: 38 - DNA, 21 bp, Artificial
  Combined DNA/RNA molecule: Synthetic oligonucleotide
  misc_RNA (1)..(19): RNA
uugguguagaugagggagatg

SEQ ID NO: 39 - DNA, 2172 bp, Homo sapiens
  CDS (252)..(1934)
aatcccttcaaccttctgcgcgcttccgccttcatgctagcaacgcccgcagtgacgcgcaggccccgccccctcccgcgcgcctcccggaagtggccggtccagagctgtggggtggcctccgcgcggtctctggcggagtcggggaatcggatcaaggcgagaggatccggcagggaaggagcttcggggccgggggttgggccgcacatttacgtgcgcgaagcggagtggaccgggagctggtgacgatggcggggccgcagcccctggcgctgcaactggaacagttgttgaacccgcgaccaagcgaggcggaccctgaagcggaccccgaggaagccactgctgccagggtgattgacaggtttgatgaaggggaagatggggaaggtgatttcctagtagtgggtagcattagaaaactggcatcagcctccctcttggacacggacaaaaggtattgcggcaaaaccacctctagaaaagcatggaatgaagaccattgggagcagactctgccaggatcgtctgatgaggaaatatctgatgaggaagggtctggagatgaagattcagagggactgggtctggaggaatatgatgaggacgacctgggtgctgctgaggaacaggagtgtggtgatcacagggagagcaagaagagcagaagccactctgcaaaaacaccgggcttcagtgtccagagtatcagtgactttgagaaatttaccaagggaatggatgaccttgggagcagtgaggaggaggaagacgaagagagtggcatggaagaaggggatgacgcggaagactcccaaggcgagagtgaggaagacagggctggagatagaaacagtgaggatgatggtgtggtgatgaccttctctagtgtcaaagtttctgaggaagtggagaaaggaagagccgtgaagaaccagatagcactgtgggaccagctcttggaaggaaggatcaaactacaaaaagctctgttgaccaccaaccagcttcctcaaccagatgttttcccattgttcaaggacaaaggtggcccagaattttccagtgccctgaaaaatagtcacaaggcacttaaagcattgttgaggtcattggtaggtcttcaggaagagttgcttttccagtacccagacactagatatctagtagatgggacaaagcccaatgcgggaagtgaggagatttctagtgaagatgatgagctggtagaagagaagaagcagcaacgaagaagggtccctgcaaagaggaagctggagatggaggactatcccagcttcatggcaaagcgctttgccgactttacagtctacaggaaccgcacacttcagaaatggcacgataagaccaaactggcttctggaaaactggggaagggttttggtgcctttgaacgctcaatcttgactcagatcgaccatattctgatggacaaagagagattacttcgaaggacacagaccaagcgctctgtctatcgagttcttggcaaacctgagccagcagctcagcctgtcccagagagtttgccaggggaaccggagatccttcctcaagcccctgctaatgctcatctgaaggacttggatgaagaaatctttgatgatgatgacttttaccaccagctccttcgagaactcatagaacggaagaccagctccttggatcccaacgatcaggtggccatgggaaggcagtggcttgcaatccagaagttacgaagcaaaatccacaaaaaagtagataggaaagccagcaaaggcaggaaacttcggtttcatgtccttagcaagctactgagtttcatggcacctattgaccatactacaatgaatgatgatgccaggacagaactgtaccgctctctttttggccagctccaccctcccgacgaaggccacggggattgacatcgcccacctccgacacccagtgggcgccttggctggtgcggctgctggtccagatggaggaaaccagtgactttatggggctgagctagtagggaagcccctggaaagatgctgcgttccgaacctgtgcctaatacacgcaagggcgctgtcccgcccaaccccgcctttaaacgccacaaataaagagcattgttaccgccaaaaaaaaaaaaaaaaaaaaaaaaaaaaaaaa

SEQ ID NO: 40 - protein, 560 aa, Homo sapiens
MAGPQPLALQLEQLLNPRPSEADPEADPEEATAARVIDRFDEGEDGEGDFLVVGSIRKLASASLLDTDKRYCGKTTSRKAWNEDHWEQTLPGSSDEEISDEEGSGDEDSEGLGLEEYDEDDLGAAEEQECGDHRESKKSRSHSAKTPGFSVQSISDFEKFTKGMDDLGSSEEEEDEESGMEEGDDAEDSQGESEEDRAGDRNSEDDGVVMTFSSVKVSEEVEKGRAVKNQIALWDQLLEGRIKLQKALLTTNQLPQPDVFPLFKDKGGPEFSSALKNSHKALKALLRSLVGLQEELLFQYPDTRYLVDGTKPNAGSEEISSEDDELVEEKKQQRRRVPAKRKLEMEDYPSFMAKRFADFTVYRNRTLQKWHDKTKLASGKLGKGFGAFERSILTQIDHILMDKERLLRRTQTKRSVYRVLGKPEPAAQPVPESLPGEPEILPQAPANAHLKDLDEEIFDDDDFYHQLLRELIERKTSSLDPNDQVAMGRQWLAIQKLRSKIHKKVDRKASKGRKLRFHVLSKLLSFMAPIDHTTMNDDARTELYRSLFGQLHPPDEGHGD

SEQ ID NO: 41 - DNA, 7492 bp, Homo sapiens
  CDS (283)..(5667)
ggcgctgagcgagctcggagcccgcgctgtgcgcctgcggccggggcgccccgccgagcgccggtgccccggctcccgggccgccttcgccgcgcgggaaggattcttcaaaattaacagaaaccaattcgggccagctgaagagaaaaaataaaggtggctcccggctgcctctgctgcagttcagagcaacttcaggagcttcccagccgagagcttcaggacgcctttcctgtcccactggcccagttgccacaacaaacaacagagaagacggtgaccatgggggatgtgaagctggttgcctcgtcacacatttccaaaacctccctcagtgtggatccctcaagagttgactccatgcccctgacagaggcccctgctttcattttgccccctcggaacctctgcatcaaagaaggagccaccgccaagttcgaagggcgggtccggggttacccagagccccaggtgacatggcacagaaacgggcaacccatcaccagcgggggccgcttcctgctggattgcggcatccgggggactttcagccttgtgattcatgctgtccatgaggaggacaggggaaagtatacctgtgaagccaccaatggcagtggtgctcgccaggtgacagtggagttgacagtagaaggaagttttgcgaagcagcttggtcagcctgttgtttccaaaaccttaggggatagattttcagctccagcagtggagacccgtcctagcatctggggggagtgcccaccaaagtttgctaccaagctgggccgagttgtggtcaaagaaggacagatgggacgattctcctgcaagatcactggccggccccaaccgcaggtcacctggctcaagggaaatgttccactgcagccgagtgcccgtgtgtctgtgtctgagaagaacggcatgcaggttctggaaatccatggagtcaaccaagatgacgtgggagtgtacacgtgcctggtggtgaacgggtcggggaaggcctcgatgtcagctgaactttccatccaaggtttggacagtgccaataggtcatttgtgagagaaacaaaagccaccaattcagatgtcaggaaagaggtgaccaatgtaatctcaaaggagtcgaagctggacagtctggaggctgcagccaaaagcaagaactgctccagcccccagagaggtggctccccaccctgggctgcaaacagccagcctcagcccccaagggagtccaagctggagtcatgcaaggactcgcccagaacggccccgcagaccccggtccttcagaagacttccagctccatcaccctgcaggccgcaagagttcagccggaaccaagagcaccaggcctgggggtcctatcaccttctggagaagagaggaagaggccagctcctccccgtccagccaccttccccaccaggcagcctggcctggggagccaagatgttgtgagcaaggctgctaacaggagaatccccatggagggccagagggattcagcattccccaaatttgagagcaagccccaaagccaggaggtcaaggaaaatcaaactgtcaagttcagatgtgaagggcttgccgtgatggaggtggccccctccttctccagtgtcctgaaggactgcgctgttattgagggccaggattttgtgctgcagtgctccgtacgggggaccccagtgccccggatcacttggctgctgaatgggcagcccatccagtacgctcgctccacctgcgaggccggcgtggctgagctccacatccaggatgccctgccggaggaccatggcacctacacctgcctagctgagaatgccttggggcaggtgtcctgcagcgcctgggtcaccgtccatgaaaagaagagtagcaggaagagtgagtaccttctgcctgtggctcccagcaagcccactgcacccatcttcctgcagggcctctctgatctcaaagtcatggatggaagccaggtcactatgactgtccaagtgtcagggaatccaccccctgaagtcatctggctgcacaatgggaatgagatccaagagtcagaggacttccactttgaacagagaggaactcagcacagcctttgtatccaggaagtgttcccggaggacacgggcacgtacacctgcgaggcctggaacagcgctggagaggtccgcacccaggccgtgctcacggtacaagagcctcacgatggcacccagccctggttcatcagtaagcctcgctcagtgacagcctccctgggccagagtgtcctcatctcctgcgccatagctggtgacccctttcctaccgtgcactggctcagagatggcaaagccctctgcaaagacactggccacttcgaggtgcttcagaatgaggacgtgttcaccctggttctaaagaaggtgcagccctggcatgccggccagtatgagatcctgctcaagaaccgggttggcgaatgcagttgccaggtgtcactgatgctacagaacagctctgccagagcccttccacgggggagggagcctgccagctgcgaggacctctgtggtggaggagttggtgctgatggtggtggtagtgaccgctatgggtccctgaggcctggctggccagcaagagggcagggttggctagaggaggaagacggcgaggacgtgcgaggggtgctgaagaggcgcgtggagacgaggcagcacactgaggaggcgatccgccagcaggaggtggagcagctggacttccgagacctcctggggaagaaggtgagtacaaagaccctatcggaagacgacctgaaggagatcccagccgagcagatggatttccgtgccaacctgcagcggcaagtgaagccaaagactgtgtctgaggaagagaggaaggtgcacagcccccagcaggtcgattttcgctctgtcctggccaagaaggggacttccaagacccccgtgcctgagaaggtgccaccgccaaaacctgccaccccggattttcgctcagtgctgggtggcaagaagaaattaccagcagagaatggcagcagcagtgccgagaccctgaatgccaaggcagtggagagttccaagcccctgagcaatgcacagccttcagggcccttgaaacccgtgggcaacgccaagcctgctgagaccctgaagccaatgggcaacgccaagcctgccgagaccctgaagcccatgggcaatgccaagcctgatgagaacctgaaatccgctagcaaagaagaactcaagaaagacgttaagaatgatgtgaactgcaagagaggccatgcagggaccacagataatgaaaagagatcagagagccaggggacagccccagccttcaagcagaagctgcaagatgttcatgtggcagagggcaagaagctgctgctccagtgccaggtgtcttctgaccccccagccaccatcatctggacgctgaacggaaagaccctcaagaccaccaagttcatcatcctctcccaggaaggctcactctgctccgtctccatcgagaaggcactgcctgaggacagaggcttatacaagtgtgtagccaagaatgacgctggccaggcggagtgctcctgccaagtcaccgtggatgatgctccagccagtgagaacaccaaggccccagagatgaaatcccggaggcccaagagctctcttcctcccgtgctaggaactgagagtgatgcgactgtgaaaaagaaacctgcccccaagacacctccgaaggcagcaatgccccctcagatcatccagttccctgaggaccagaaggtacgcgcaggagagtcagtggagctgtttggcaaagtgacaggcactcagcccatcacctgtacctggatgaagttccgaaagcagatccaggaaagcgagcacatgaaggtggagaacagcgagaatggcagcaagctcaccatcctggccgcgcgccaggagcactgcggctgctacacactgctggtggagaacaagctgggcagcaggcaggcccaggtcaacctcactgtcgtggataagccagaccccccagctggcacaccttgtgcctctgacattcggagctcctcactgaccctgtcctggtatggctcctcatatgatgggggcagtgctgtacagtcctacagcatcgagatctgggactcagccaacaagacgtggaaggaactagccacatgccgcagcacctctttcaacgtccaggacctgctgcctgaccacgaatataagttccgtgtacgtgcaatcaacgtgtatggaaccagtgagccaagccaggagtctgaactcacaacggtaggagagaaacctgaagagccgaaggatgaagtggaggtgtcagatgatgatgagaaggagcccgaggttgattaccggacagtgacaatcaatactgaacaaaaagtatctgacttctacgacattgaggagagattaggatctgggaaatttggacaggtctttcgacttgtagaaaagaaaactcgaaaagtctgggcagggaagttcttcaaggcatattcagcaaaagagaaagagaatatccggcaggagattagcatcatgaactgcctccaccaccctaagctggtccagtgtgtggatgcctttgaagaaaaggccaacatcgtcatggtcctggagatcgtgtcaggaggggagctgtttgagcgcatcattgacgaggactttgagctgacggagcgtgagtgcatcaagtacatgcggcagatctcggagggagtggagtacatccacaagcagggcatcgtgcacctggacctcaagccggagaacatcatgtgtgtcaacaagacgggcaccaggatcaagctcatcgactttggtctggccaggaggctggagaatgcggggtctctgaaggtcctctttggcaccccagaatttgtggctcctgaagtgatcaactatgagcccatcggctacgccacagacatgtggagcatcggggtcatctgctacatcctaaaccgcctggactgcacgcagtgccttcagcatccatggctaatgaaagataccaagaacatggaggccaagaaactctccaaggaccggatgaagaagtacatggcaagaaggaaatggcagaaaacgggcaatgctgtgagagccattggaagactgtcctctatggcaatgatctcagggctcagtggcaggaaatcctcaacagggtcaccaaccagcccgctcaatgcagaaaaactagaatctgaagaagatgtgtcccaagctttccttgaggctgttgctgaggaaaagcctcatgtaaaaccctatttctctaagaccattcgcgatttagaagttgtggagggaagtgctgctagatttgactgcaagattgaaggatacccagaccccgaggttgtctggttcaaagatgaccagtcaatcagggagtcccgccacttccagatagactacgatgaggacgggaactgctctttaattattagtgatgtttgcggggatgacgatgccaagtacacctgcaaggctgtcaacagtcttggagaagccacctgcacagcagagctcattgtggaaacgatggaggaaggtgaaggggaaggggaagaggaagaagagtgaaacaaagccagagaaaagcagtttctaagtcatattaaaaggactatttctctaaaactcaaaaaaaaaaaaaaaactcaagatagtaaaagcacctagtgtgatagattatcggttaggtcatttgtgggttgattcttcagaaacagcagttgatacctagcagcgttattgatgggcattaatctatgttagttggcaccttaagatactagtgcagctagatttcatttagggaaatcaccagtaacttgactgaccaattgattttagagagaaagtaaccaaaccaaatatttatctgggcaaagtcataaattctccacttgaatgcgctcatgaaaaataaggccaaaacaagagttctgggccacagctcagcccagagggttcctggggatgggaggcctctctctccccaccccctgactctagagaactgggttttctcccagtactccagcaattcatttctgaaagcagttgagccactttattccaaagtacactgcagatgttcaaactctccatttctctttccccttccacctgccagttttgctgactctcaacttgtcatgagtgtaagcattaaggacattatgcttcttcgattctgaagacaggtccctgctcatggatgactctggcttccttaggaaaatatttttcttccaaaatcagtaggaaatctaaacttatcccctctttgcagatgtctagcagcttcagacatttggttaagaacccatgggaaaaaaaaaatccttgctaatgtggtttcctttgtaaaccaggattcttatttgtgctgttatagaatatcagctctgaacgtgtggtaaagatttttgtgtttgaatataggagaaatcagtttgctgaaaagttagtcttaattatctattggccacgatgaaacagatttcaactgataaagagctggagaactccatgtactttggaatctcctccaagatagccagagtttaatacatcttcattctcaacactctccaaagaacttgacctaccttatgggttccatatttttcttcttaaatgtgcatcaatcatgccttgcccccaacctttaaatatattcttagacctggtaaatgcactcagacttgcgtctttaggaatttttaactttctttcactacattggcacttaaattttttctttataaagctttttgaaggtcataaacaaagaccataattgatgatagacctaatacatttcctctgtgtgtgtgtgtaacattccaaatactttttttttcttttccactgtttgtaaggtgcaacaatttaatatttttaagggactttttaagagttccttaagaaccaatttaaaattacttcagtgcaatcctacacagtatcaacattagaattttgatattagtcttatgttatcttccattctatttttatctgctttttgctgctagtttcaaactgccagtatttttccttttgcttttaaaatagttacaatatttttcatgatagccacagtattgccacagtttattataataaagggtttttatttgatttagcgcattcaaagcttttttctatcacttttgtgttcagaatataacctttgtgtgcgtgtatgttgtgtgtgtgcatgtgtggcgtatatgtgtgttacaggttaatgccttcttggaattgtgttaatgttctcttggtttattatgccatcagaatggtaaatgagaacactacaactgtagtcagctcacaatttttaaataaaggataccacagtgcatgctgtttgttcaaaaaaaaaaaaaaaaaa

SEQ ID NO: 42 - protein, 1794 aa, Homo sapiens
MGDVKLVASSHISKTSLSVDPSRVDSMPLTEAPAFILPPRNLCIKEGATAKFEGRVRGYPEPQVTWHRNGQPITSGGRFLLDCGIRGTFSLVIHAVHEEDRGKYTCEATNGSGARQVTVELTVEGSFAKQLGQPVVSKTLGDRFSAPAVETRPSIWGECPPKFATKLGRVVVKEGQMGRFSCKITGRPQPQVTWLKGNVPLQPSARVSVSEKNGMQVLEIHGVNQDDVGVYTCLVVNGSGKASMSAELSIQGLDSANRSFVRETKATNSDVRKEVTNVISKESKLDSLEAAAKSKNCSSPQRGGSPPWAANSQPQPPRESKLESCKDSPRTAPQTPVLQKTSSSITLQAARVQPEPRAPGLGVLSPSGEERKRPAPPRPATFPTRQPGLGSQDVVSKAANRRIPMEGQRDSAFPKFESKPQSQEVKENQTVKFRCEGLAVMEVAPSFSSVLKDCAVIEGQDFVLQCSVRGTPVPRITWLLNGQPIQYARSTCEAGVAELHIQDALPEDHGTYTCLAENALGQVSCSAWVTVHEKKSSRKSEYLLPVAPSKPTAPIFLQGLSDLKVMDGSQVTMTVQVSGNPPPEVIWLHNGNEIQESEDFHFEQRGTQHSLCIQEVFPEDTGTYTCEAWNSAGEVRTQAVLTVQEPHDGTQPWFISKPRSVTASLGQSVLISCAIAGDPFPTVHWLRDGKALCKDTGHFEVLQNEDVFTLVLKKVQPWHAGQYEILLKNRVGECSCQVSLMLQNSSARALPRGREPASCEDLCGGGVGADGGGSDRYGSLRPGWPARGQGWLEEEDGEDVRGVLKRRVETRQHTEEAIRQQEVEQLDFRDLLGKKVSTKTLSEDDLKEIPAEQMDFRANLQRQVKPKTVSEEERKVHSPQQVDFRSVLAKKGTSKTPVPEKVPPPKPATPDFRSVLGGKKKLPAENGSSSAETLNAKAVESSKPLSNAQPSGPLKPVGNAKPAETLKPMGNAKPAETLKPMGNAKPDENLKSASKEELKKDVKNDVNCKRGHAGTTDNEKRSESQGTAPAFKQKLQDVHVAEGKKLLLQCQVSSDPPATIIWTLNGKTLKTTKFIILSQEGSLCSVSIEKALPEDRGLYKCVAKNDAGQAECSCQVTVDDAPASENTKAPEMKSRRPKSSLPPVLGTESDATVKKKPAPKTPPKAAMPPQIIQFPEDQKVRAGESVELFGKVTGTQPITCTWMKFRKQIQESEHMKVENSENGSKLTILAARQEHCGCYTLLVENKLGSRQAQVNLTVVDKPDPPAGTPCASDIRSSSLTLSWYGSSYDGGSAVQSYSIEIWDSANKTWKELATCRSTSFNVQDLLPDHEYKFRVRAINVYGTSEPSQESELTTVGEKPEEPKDEVEVSDDDEKEPEVDYRTVTINTEQKVSDFYDIEERLGSGKFGQVFRLVEKKTRKVWAGKFFKAYSAKEKENIRQEISIMNCLHHPKLVQCVDAFEEKANIVMVLEIVSGGELFERIIDEDFELTERECIKYMRQISEGVEYIHKQGIVHLDLKPENIMCVNKTGTRIKLIDFGLARRLENAGSLKVLFGTPEFVAPEVINYEPIGYATDMWSIGVICYILNRLDCTQCLQHPWLMKDTKNMEAKKLSKDRMKKYMARRKWQKTGNAVRAIGRLSSMAMISGLSGRKSSTGSPTSPLNAEKLESEEDVSQAFLEAVAEEKPHVKPYFSKTIRDLEVVEGSAARFDCKIEGYPDPEVVWFKDDQSIRESRHFQIDYDEDGNCSLIISDVCGDDDAKYTCKAVNSLGEATCTAELIVETMEEGEGEGEEEEE

SEQ ID NO: 43 - DNA, 2358 bp, Homo sapiens
  CDS (54)..(2045)
cccgggaatcgcacaggacccggctcccctcgcctaagctgctggggggcgccatgggccgctaccgcatccgcgtggccaccggggcctggctcttctccgggtcgtacaaccgcgtgcagctttggctggtcgggacgcgcggggaggcggagctggagctgcagctgcggcccgcgcggggcgaggaggaggagtttgatcatgacgttgcagaggacttggggctcctgcagttcgtgaggctgcgcaagcaccactggctggtggacgacgcgtggttctgcgaccgcatcacggtgcagggccctggagcctgcgcggaggtggccttcccgtgctaccgctgggtgcagggcgaggacatcctgagcctgcccgagggcaccgcccgcctgccaggagacaatgctttggacatgttccagaagcatcgagagaaggaactgaaagacagacagcagatctactgctgggccacctggaaggaagggttacccctgaccatcgctgcagaccgtaaggatgatctacctccaaatatgagattccatgaggagaagaggctggactttgaatggacactgaaggcaggggctctggagatggccctcaaacgtgtttacaccctcctgagctcctggaactgcctagaagactttgatcagatcttctggggccagaagagtgccctggctgagaaggttcgccagtgctggcaggatgatgagttgttcagctaccagttcctcaatggtgccaaccccatgctgttgagacgctcgacctctctgccctccaggctagtgctgccctcggggatggaagagcttcaggctcaactggagaaagaacttcagaatggttccctgtttgaagctgacttcatccttctggatggaattccagccaacgtgatccgaggagagaagcaatacctggctgcccccctcgttatgctgaagatggagcccaatgggaagctgcagcccatggtcatccagattcagcctcccaaccccagctctccaaccccaacactgttcctgccctcagaccccccacttgcctggctcctggcaaagtcctgggtccgaaattcagatttccaactgcacgagatccagtatcacttgctgaacactcacctggtggctgaggtcatcgctgtcgccaccatgcggtgcctcccaggactgcaccccatcttcaagttcctgatcccccatatccgctacaccatggaaatcaacacccgggcccggacccaactcatctcagatggaggaatttttgataaggcagtgagcacaggtggagggggccatgtacagttgctccgtcgggcggcagctcagctgacctactgctccctctgtcctcctgacgacctggctgaccggggcctgctgggactcccaggtgctctctatgcccatgatgctttacggctctgggagatcattgccaggtatgtggaggggatcgtccacctcttctaccaaagggatgacatagtgaagggggaccctgagctgcaggcctggtgtcgggagatcacggaggtggggctgtgccaggcccaggaccgaggtttccctgtctccttccagtcccagagtcaactctgccatttcctcaccatgtgcgtcttcacgtgcactgcccagcatgccgccatcaaccagggccagctggactggtatgcctgggtccctaatgctccatgcacaatgcggatgcccccacccaccaccaaggaagatgtgacgatggccacagtgatggggtcactacctgatgtccggcaggcctgtcttcaaatggccatctcatggcatctgagtcgccgccagccagacatggtgcctctggggcaccacaaagaaaaatatttctcaggccccaagcccaaagctgtgctaaaccaattccgaacagatttggaaaagctggaaaaggagattacagcccggaatgagcaacttgactggccctatgaatatctgaagcccagctgcatagagaacagtgtcaccatctgagccctagagtgactctacctgcaagatttcacatcagctttaggactgacatttctatcttgaatttcatgctttcctaaagtctctgctgctaaggctctatttcctcccccagttaaaccccctacattagtatcccactagcccaggggagcagtaaactttctctgcaaagactagatccttttttacgctttgcagaccgcatagtcactgtctcaactactcagctctcctgctgcagcatgaaggcagccacagacaacatggaaatgagtgtgactatgttccaataaaactttatggacactga

SEQ ID NO: 44 - protein, 663 aa, Homo sapiens
MGRYRIRVATGAWLFSGSYNRVQLWLVGTRGEAELELQLRPARGEEEEFDHDVAEDLGLLQFVRLRKHHWLVDDAWFCDRITVQGPGACAEVAFPCYRWVQGEDILSLPEGTARLPGDNALDMFQKHREKELKDRQQIYCWATWKEGLPLTIAADRKDDLPPNMRFHEEKRLDFEWTLKAGALEMALKRVYTLLSSWNCLEDFDQIFWGQKSALAEKVRQCWQDDELFSYQFLNGANPMLLRRSTSLPSRLVLPSGMEELQAQLEKELQNGSLFEADFILLDGIPANVIRGEKQYLAAPLVMLKMEPNGKLQPMVIQIQPPNPSSPTPTLFLPSDPPLAWLLAKSWVRNSDFQLHEIQYHLLNTHLVAEVIAVATMRCLPGLHPIFKFLIPHIRYTMEINTRARTQLISDGGIFDKAVSTGGGGHVQLLRRAAAQLTYCSLCPPDDLADRGLLGLPGALYAHDALRLWEIIARYVEGIVHLFYQRDDIVKGDPELQAWCREITEVGLCQAQDRGFPVSFQSQSQLCHFLTMCVFTCTAQHAAINQGQLDWYAWVPNAPCTMRMPPPTTKEDVTMATVMGSLPDVRQACLQMAISWHLSRRQPDMVPLGHHKEKYFSGPKPKAVLNQFRTDLEKLEKEITARNEQLDWPYEYLKPSCIENSVTI

SEQ ID NO: 45 - DNA, 1556 bp, Homo sapiens
  CDS (209)..(1249)
acttgtttcactttgtttttggacatagctgagccatgtacttcaaacagaaggcagccaattactaacttctggttgctaggtgtggcttcctttaaaatcctataaaatcagaagcccaagtctccactgccagtgtgaaatcttcagagaagaatttctctttagttctttgcaagaaggtagagataaagacactttttcaaaaatggcaatggtatcagaattcctcaagcaggcctggtttattgaaaatgaagagcaggaatatgttcaaactgtgaagtcatccaaaggtggtcccggatcagcggtgagcccctatcctaccttcaatccatcctcggatgtcgctgccttgcataaggccataatggttaaaggtgtggatgaagcaaccatcattgacattctaactaagcgaaacaatgcacagcgtcaacagatcaaagcagcatatctccaggaaacaggaaagcccctggatgaaacactgaagaaagcccttacaggtcaccttgaggaggttgttttagctctgctaaaaactccagcgcaatttgatgctgatgaacttcgtgctgccatgaagggccttggaactgatgaagatactctaattgagattttggcatcaagaactaacaaagaaatcagagacattaacagggtctacagagaggaactgaagagagatctggccaaagacataacctcagacacatctggagattttcggaacgctttgctttctcttgctaagggtgaccgatctgaggactttggtgtgaatgaagacttggctgattcagatgccagggccttgtatgaagcaggagaaaggagaaaggggacagacgtaaacgtgttcaataccatccttaccaccagaagctatccacaacttcgcagagtgtttcagaaatacaccaagtacagtaagcatgacatgaacaaagttctggacctggagttgaaaggtgacattgagaaatgcctcacagctatcgtgaagtgcgccacaagcaaaccagctttctttgcagagaagcttcatcaagccatgaaaggtgttggaactcgccataaggcattgatcaggattatggtttcccgttctgaaattgacatgaatgatatcaaagcattctatcagaagatgtatggtatctccctttgccaagccatcctggatgaaaccaaaggagattatgagaaaatcctggtggctctttgtggaggaaactaaacattcccttgatggtctcaagctatgatcagaagactttaattatatattttcatcctataagcttaaataggaaagtttcttcaacaggattacagtgtagctacctacatgctgaaaaatatagcctttaaatcatttttatattataactctgtataatagagataagtccattttttaaaaatgttttccccaaaccataaaaccctatacaagttgttctagtaacaatacatgagaaagatgtctatgtagctgaaaataaaatgacgtcacaagacaaaaaaaaaaaaaaaaaaaaaaa

SEQ ID NO: 46 - protein, 346 aa, Homo sapiens
MAMVSEFLKQAWFIENEEQEYVQTVKSSKGGPGSAVSPYPTFNPSSDVAALHKAIMVKGVDEATIIDILTKRNNAQRQQIKAAYLQETGKPLDETLKKALTGHLEEVVLALLKTPAQFDADELRAAMKGLGTDEDTLIEILASRTNKEIRDINRVYREELKRDLAKDITSDTSGDFRNALLSLAKGDRSEDFGVNEDLADSDARALYEAGERRKGTDVNVFNTILTTRSYPQLRRVFQKYTKYSKHDMNKVLDLELKGDIEKCLTAIVKCATSKPAFFAEKLHQAMKGVGTRHKALIRIMVSRSEIDMNDIKAFYQKMYGISLCQAILDETKGDYEKILVALCGGN

SEQ ID NO: 47 - DNA, 2158 bp, Homo sapiens
  CDS (228)..(1193)
gccccaggtgcgcttcccctagagagggattttccggtctcgtgggcagaggaacaaccaggaacttgggctcagtctccaccccacagtggggcggatccgtcccggataagacccgctgtctggccctgagtagggtgtgacctccgcagccgcagaggaggagcgcagcccggcctcgaagaacttctgcttgggtggctgaactctgatcttgacctagagtcatggccatggcaaccaaaggaggtactgtcaaagctgcttcaggattcaatgccatggaagatgcccagaccctgaggaaggccatgaaagggctcggcaccgatgaagacgccattattagcgtccttgcctaccgcaacaccgcccagcgccaggagatcaggacagcctacaagagcaccatcggcagggacttgatagacgacctgaagtcagaactgagtggcaacttcgagcaggtgattgtggggatgatgacgcccacggtgctgtatgacgtgcaagagctgcgaagggccatgaagggagccggcactgatgagggctgcctaattgagatcctggcctcccggacccctgaggagatccggcgcataagccaaacctaccagcagcaatatggacggagccttgaagatgacattcgctctgacacatcgttcatgttccagcgagtgctggtgtctctgtcagctggtgggagggatgaaggaaattatctggacgatgctctcgtgagacaggatgcccaggacctgtatgaggctggagagaagaaatgggggacagatgaggtgaaatttctaactgttctctgttcccggaaccgaaatcacctgttgcatgtgtttgatgaatacaaaaggatatcacagaaggatattgaacagagtattaaatctgaaacatctggtagctttgaagatgctctgctggctatagtaaagtgcatgaggaacaaatctgcatattttgctgaaaagctctataaatcgatgaagggcttgggcaccgatgataacaccctcatcagagtgatggtttctcgagcagaaattgacatgttggatatccgggcacacttcaagagactctatggaaagtctctgtactcgttcatcaagggtgacacatctggagactacaggaaagtactgcttgttctctgtggaggagatgattaaaataaaaatcccagaaggacaggaggattctcaacactttgaatttttttaacttcatttttctacactgctattatcattatctcagaatgcttatttccaattaaaacgcctacagctgcctcctagaatatagactgtctgtattattattcacctataattagtcattatgatgctttaaagctgtacttgcatttcaaagcttataagatataaatggagattttaaagtagaaataaatatgtattccatgtttttaaaagattactttctactttgtgtttcacagacattgaatatattaaattattccatattttcttttcagtgaaaaattttttaaatggaagactgttctaaaatcacttttttccctaatccaatttttagagtggctagtagtttcttcatttgaaattgtaagcatccggtcagtaagaatgcccatccagttttctatatttcatagtcaaagccttgaaagcatctacaaatctctttttttaggttttgtccatagcatcagttgatccttactaagtttttcatgggagacttccttcatcacatcttatgttgaaatcactttctgtagtcaaagtataccaaaaccaatttatctgaactaaattctaaagtatggttatacaaaccatatacatctggttaccaaacataaatgctgaacattccatattattatagttaatgtcttaatccagcttgcaagtgaatggaaaaaaaaataagcttcaaactaggtattctgggaatgatgtaatgctctgaatttagtatgatataaagaaaacttttttgtgctaaaaatactttttaaaatcaattttgttgattgtagtaatttctatttgcactgtgcctttcaactccagaaacattctgaagatgtacttggatttaattaaaaagttcactttgtaagaaaaaaaaaaaaaaaaaa

SEQ ID NO: 48 - protein, 321 aa, Homo sapiens
MAMATKGGTVKAASGFNAMEDAQTLRKAMKGLGTDEDAIISVLAYRNTAQRQEIRTAYKSTIGRDLIDDLKSELSGNFEQVIVGMMTPTVLYDVQELRRAMKGAGTDEGCLIEILASRTPEEIRRISQTYQQQYGRSLEDDIRSDTSFMFQRVLVSLSAGGRDEGNYLDDALVRQDAQDLYEAGEKKWGTDEVKFLTVLCSRNRNHLLHVFDEYKRISQKDIEQSIKSETSGSFEDALLAIVKCMRNKSAYFAEKLYKSMKGLGTDDNTLIRVMVSRAEIDMLDIRAHFKRLYGKSLYSFIKGDTSGDYRKVLLVLCGGDD

SEQ ID NO: 49 - DNA, 3782 bp, Homo sapiens
  CDS (174)..(1748)
gtctttacgtagacgtcgggggcgcagccgcgctgtgcgcggtgactggcggctgcactggcggcagctggaggtgtaatagtgcgggtagtgggtttggagaagttccgaggcggcggtggcgccggtcaggacaaggatagcggaaccgggccctgggcttgtcgctcaccatgccgacagtagaggagctttaccgcaattatggcatcctggccgatgccacggagcaagtgggccagcataaagatgcctatcaagtgatattggatggtgtgaaaggtggtactaaggaaaagcgattagcagctcaatttattccgaaattctttaagcattttccagaattggctgattctgctatcaatgcacagttagacctctgtgaggatgaagatgtatctattcgacgtcaagcaattaaagaactgcctcaatttgccactggagaaaatcttcctcgagtggcagatatactaacgcaacttttgcagacagatgactctgcagaatttaacctagtgaacaatgccctattaagtatatttaaaatggatgcaaaagggactttaggtgggttgttcagccaaatacttcaaggagaggacattgttagagaacgagcaattaaattcctttctacaaaacttaagactttaccagatgaagtcttaacaaaggaagtggaagagcttatactaactgaatccaaaaaggtcctagaagatgtgactggtgaagaatttgttctatttatgaagatactgtctgggttaaaaagcttacagacagtgagtggaagacagcaacttgtagagttggtggctgaacaggccgacctagaacagaccttcaatccctcggatcctgactgtgtggacaggctcttacagtgcactcggcaggcagtacccctcttctctaaaaatgtccattccacaaggtttgtgacatatttctgtgagcaggttctccctaacctcggtaccttgactaccccagtggaaggtcttgatatacagttggaggtattgaaattgttggcggagatgagttcattttgtggtgacatggaaaaactagaaacaaatttaaggaaactatttgataagttattggaatacatgcccctccctccagaagaggcagaaaatggagagaatgctggtaatgaagaacccaagctacagttcagttatgtggaatgtttgttgtacagttttcaccagttgggccgaaaacttccagatttcttaacagccaaactgaatgcagaaaagctcaaagatttcaaaatcaggctgcagtactttgcacggggcctgcaagtttatatcagacaacttcgcttagctctccagggtaaaacgggtgaggccttaaaaacagaagagaacaagattaaagtcgttgcattgaaaataacaaacaatatcaatgttttaatcaaggatctcttccacattcctccttcttataagagcacagtaacactatcctggaaacctgtacaaaaggttgagattgggcaaaagagagccagtgaagatacaacttcaggttcaccacccaagaaatcttcagcaggaccaaaaagagatgccaggcagatttataaccctcccagtgggaaatatagcagcaatttgggcaactttaattatgagcagagaggagccttcaggggaagtagaggtggccgaggttggggcacacgaggaaatcgtagtcggggaagactctactgaataagacatcagcattcttcagcattgtcatgagcttaatatacttaaattctactactcattggattgccggggatgtccctttaaacagactgctgccttcagctaaaaacttaatgttctttatacctttgtatgtatgacctacttttgtaacagaccatggttgtgtccaaggtaaaaccacagtgatatttttggatgctttgtctgcaatcttgacttgtttttgcagtatcattattcagacttcaaattgtgaatcttttaaacatcttgataatttgttgttgagagctgttcattctaaaatgtaatgaaattcagtctagttctgctgataaagatcatcagttttgaaaggttactgattttcctcttccctcttagttttttacccaatatatggagaagagtaatggtcaatcttaacattttgttttaattgtttaataaagctgctgggcagtggtgcagcattcctacctagtgtcataaaagcaaaatacttacatagctttcttaaaatataggaatgacattacatttttaggagaaagtaagttgctttgcaccgcctacttaattcttttccatatattgtgatacaaacttttgaatatggaatcttactatttgaatagaaatgtgtatgtataatatacatacatacataagcatatatgtgtgtgtgtgtgtgtatatatatatatatgcatgctgtgaaacttgactacacaacataaatcactttttaaattccaggaacgggtagtctgacacggtgattatccttttgaggctgaatccgttattaacttgttatttaggtttttactcccagtagcaagggattctaagttagttgcacttacatgattattgttatttaaaactaagaataaaggctgcattttcaaagataaattggaattgctgttggtgaaataacaaccaaaatactgaatctgatgtacatacaggtttctacaggaagagatggtataatttacaatttggagatttaataaccagggctacccagaaaaagtgacttgataacatggtaccaataagtaagggatgctctctcggtttgcttttgccactttcaagattttaacttctcaggttattaatcaaaattattgtataagttagccaatagaatttttaggttaaaacaacagatggggggtttgtggagtgtttaatgtcatgggcatttttagtagcatagaccctttgttctgcatttgaatgtttcgtatatttttgtttcacagttaatcttccctccccaagtttgctattcaaatcaactgcctgaatgacatttctagtagtctgatgtatttttctgaggaatagtttgtgattccaatgcaggtgtcttcattaccattacctctacactgcagaagaagcaaaactcctttattagaattactgcacatgtgtatggggaaaatagttctgaaaggctagaatgatacaagtgagcaaaagttggtcagcttggctatggagtggtggcaataatctctaaacattccaaaagaccatgagctgaacctaaactcccttggaatctgaacaaaggaatataaaattgccatttgaaaactgaccagctaatctggacctcagagatagatcagccagtggcccaaagccatttcaagtacagaaattatagagactacagctaaataaatttgaacattaaatataattttaccactttttgtctttataagcatatttgtaaactcagaactgagcagaagtgactttactttctcaagtttgatactgagttgactgttcccttatccctcacccttccccttccctttcctaaggcaatagtgcacaacttaggttatttttgcttccgaatttgaatgaaaaacttaatgccatggatttttttcttttgcaagacacctgtttatcatcttgtttaaatgtaaatgtccccttatgcttttgaaataaatttccttttgtaattttgaaaaaaaaaaaaaa

SEQ ID NO: 50 - protein, 524 aa, Homo sapiens
MPTVEELYRNYGILADATEQVGQHKDAYQVILDGVKGGTKEKRLAAQFIPKFFKHFPELADSAINAQLDLCEDEDVSIRRQAIKELPQFATGENLPRVADILTQLLQTDDSAEFNLVNNALLSIFKMDAKGTLGGLFSQILQGEDIVRERAIKFLSTKLKTLPDEVLTKEVEELILTESKKVLEDVTGEEFVLFMKILSGLKSLQTVSGRQQLVELVAEQADLEQTFNPSDPDCVDRLLQCTRQAVPLFSKNVHSTRFVTYFCEQVLPNLGTLTTPVEGLDIQLEVLKLLAEMSSFCGDMEKLETNLRKLFDKLLEYMPLPPEEAENGENAGNEEPKLQFSYVECLLYSFHQLGRKLPDFLTAKLNAEKLKDFKIRLQYFARGLQVYIRQLRLALQGKTGEALKTEENKIKVVALKITNNINVLIKDLFHIPPSYKSTVTLSWKPVQKVEIGQKRASEDTTSGSPPKKSSAGPKRDARQIYNPPSGKYSSNLGNFNYEQRGAFRGSRGGRGWGTRGNRSRGRLY

SEQ ID NO: 51 - DNA, 2293 bp, Homo sapiens
  CDS (583)..(1431)
atttgggagagtgctgtgactcatgctggactctaacccacgagggtttctcagagtcagcagctgggggatgaagaagtgaaaagtgactggcaggaaattctgcaagcaaggaaagggaaagagaaatgaactggtgcaggtctgcgggaagagaatgaggctggatcctcaaaatcacaggaggaagcaggcccagacctcagaggcagaaagagaaagaaaccagagcttagagtcaggaggaggaaaccagaccccggagccacaaggagagggctggatccccggctcagagggaagagtgtcgccgcctctgcctgcgtagccccggccatggctctgtagcctcgacccctttgtgcccccggcccgtctccgcgctcaccacgcctgcgctctccgctcccaccttctttcttcagccgaggccgccgccgcctctccttgctgcagccatggagtcttccactttcgccttggtgcctgtcttcgcccacctgagcatcctccagagcctcgtgccagctgctggtgcagcctctcctgttgccatcagtgcccagcacctgtgctacagccatgtcactcctggcgaccctggggctggagctggacagggccctgctcccagctagtgggctgggatggctcgtagactatgggaaactccccccggcccctgcccccctggctccctatgaggtccttgggggagccctggagggcgggcttccagtggggggagagcccctggcaggtgatggcttctctgactggatgactgagcgagttgatttcacagctctcctccctctggagcctcccttaccccccggcaccctcccccaaccttccccaaccccacctgacctggaagctatggcctccctcctcaagaaggagctggaacagatggaagacttcttcctagatgccccgcccctcccaccaccctccccgccgccactaccaccaccaccactaccaccagccccctccctccccctgtccctcccctcctttgacctcccccagccccctgtcttggatactctggacttgctggccatctactgccgcaacgaggccgggcaggaggaagtggggatgccgcctctgcccccgccacagcagccccctcctccttctccacctcaaccttctcgcctggccccctacccacatcctgccaccacccgaggggaccgcaagcaaaagaagagagaccagaacaagtcggcggctctgaggtaccgccagcggaagcgggcagagggtgaggccctggagggcgagtgccaggggctggaggcacggaatcgcgagctgaaggaacgggcagagtccgtggagcgcgagatccagtacgtcaaggacctgctcatcgaggtttacaaggcccggagccagaggacccgtagctgctagaagggcaggggtgtggcttctgggggctggtcttcagctctggcgccttcatccccctgcctctaccttcattccaaacccctctcggccgggtgcagtggcttatgcttgtaatcccagcactttgggaggccaaggcaggaggatcgtttgaggccaggaggtcaataccagcctgggcaacatagtaagaccctgtctctattaaaaaaaaaaaatcaacccttcttccccaccaaaccacccaactcctctctactcttatccttttatcctctgtctctgcttatcacctctcttgcgtatttctggatctccttccctcctttctcgtccaaatcatgaaatgtttggccttagtcaatgtctatgcccgtcacataacagccgaggcaccgaggcccacagggaagcagctgggagcttggaaacctggtctcttgaatttcaaacctggtttcttacaggtggttgtctggggtgggtggagtggcgacaggatagagctgaaggactatgcaaatgaggaagtaagtcagggcgggctttgagaaggggacccatatcctacaggcaaaaagcaggctaggtgaccttgggacactacgctaagggagggaggctaaaggcggccaggtttgcagtgcgggaagatgagcaggccagtgggaggaggggcagggcagggctgtagttggtgactgggtgttcattttagctctaagaaaaaaaatcagtgtttcgtgaaggtgttggagaggggctgtgtctgggtgagggatggcggggtactgatttttttgggaggttatgagcaaaaataaaacgaaacatttcctctggcaaaaaaaaaaaaaaaaaa

SEQ ID NO: 52 - protein, 282 aa, Homo sapiens
MSLLATLGLELDRALLPASGLGWLVDYGKLPPAPAPLAPYEVLGGALEGGLPVGGEPLAGDGFSDWMTERVDFTALLPLEPPLPPGTLPQPSPTPPDLEAMASLLKKELEQMEDFFLDAPPLPPPSPPPLPPPPLPPAPSLPLSLPSFDLPQPPVLDTLDLLAIYCRNEAGQEEVGMPPLPPPQQPPPPSPPQPSRLAPYPHPATTRGDRKQKKRDQNKSAALRYRQRKRAEGEALEGECQGLEARNRELKERAESVEREIQYVKDLLIEVYKARSQRTRSC

SEQ ID NO: 53 - DNA, 1551 bp, Homo sapiens
  CDS (57)..(1145)
gggcgtctccgccgcagctcggctcccgcgcgctcagcaccgccagcggcggccagatgcaggcggagcgaggagctcggggaggccgtgggcggcggccaggccgcggccggcctggcggagatcgccacagcgagcggcccggagccgcagcggcggtagccagaggcggcggcggaggcggcggcggggacggaggcggacgccggggccgtggccgtggccggggcttccgcggcgctcgcggaggccgaggaggaggaggcgccccgcgaggcagccgccgggagccgggaggctggggcgcaggggccagcgcgccggttgaagatgacagcgatgcagagacctatggagaagagaatgatgaacagggaaattattctaaaagaaagattgtctctaactgggatcgatatcaagatattgaaaaagaggtcaataatgaaagtggagagtcacagaggggaacagatttcagtgtcctccttagctctgcaggggactcattctcacagttccggtttgctgaggagaaagaatgggatagtgaagcttcttgtccaaaacagaattcagcattttatgtggatagtgagttattggttcgagcccttcaagagctgcctctctgcctccgactcaacgttgctgccgaactggtccagggtacagttcctttagaggttcctcaggtgaaaccaaagagaactgatgatggcaagggattagggatgcagttaaaggggcccttggggcctggaggaagggggcccatctttgagctgaaatctgtggctgctggctgccctgtgttgctgggcaaagacaacccaagcccgggtccttcaagggattctcagaaacccacttccccactgcagtcagcaggagaccatttggaagaagaactagatctgttgcttaatttagatgcacctataaaagagggagataacatcttaccagatcagacgtctcaggacctgaaatccaaggaagatggggaggtggtccaagaggaagaagtttgtgcaaaaccatctgtgactgaagaaaaaaacatggaacctgagcaaccaagtacctccaaaaatgttaccgaggaagagctggaagactggttggacagcatgatttcctaaaaaggggaaaaaaagtgcctgaagcaaatcttggttgccttctaacggcaggtgggcataaggctgtccttcaggaccagccagtttacaagcatgtctcaagctagtgtgttccattatgctcacagcagtaaatgcctacctctgtgtttgacatctgaaagaatacattgaagcagcttgttgcatttgtttttctggcttagtaatctaatagatttccttaagggcaggagatagactctggcccttgtttctagcctccttccttgcagtgtttacaacatagccagtgtttacagcatagcagatgctgctgctgattaagagaatagatgcaaacaaggcatgcatttggccaaaataaacaaatgctggtctgtccaaaaaaaaaaaaaaaaaaaaa

SEQ ID NO: 54 - protein, 362 aa, Homo sapiens
MQAERGARGGRGRRPGRGRPGGDRHSERPGAAAAVARGGGGGGGGDGGGRRGRGRGRGFRGARGGRGGGGAPRGSRREPGGWGAGASAPVEDDSDAETYGEENDEQGNYSKRKIVSNWDRYQDIEKEVNNESGESQRGTDFSVLLSSAGDSFSQFRFAEEKEWDSEASCPKQNSAFYVDSELLVRALQELPLCLRLNVAAELVQGTVPLEVPQVKPKRTDDGKGLGMQLKGPLGPGGRGPIFELKSVAAGCPVLLGKDNPSPGPSRDSQKPTSPLQSAGDHLEEELDLLLNLDAPIKEGDNILPDQTSQDLKSKEDGEVVQEEEVCAKPSVTEEKNMEPEQPSTSKNVTEEELEDWLDSMIS

SEQ ID NO: 55 - DNA, 912 bp, Homo sapiens
  CDS (17)..(772)
acagacctgccccgccatgacccggctgacagtcctggccctgctggctggtctgctggcgtcctcgagggccggctccagcccccttttggacatcgttggcggccggaaggcgaggccccgccagttcccgttcctggcctccattcagaatcaaggcaggcacttctgcgggggtgccctgatccatgcccgcttcgtgatgaccgcggccagctgcttccaaagccagaaccccggggttagcaccgtggtgctgggtgcctatgacctgaggcggcgggagaggcagtcccgccagacgttttccatcagcagcatgagcgagaatggctacgacccccagcagaacctgaacgacctgatgctgcttcagctggaccgtgaggccaacctcaccagcagcgtgacgatactgccactgcctctgcagaacgccacggtggaagccggcaccagatgccaggtggccggctgggggagccagcgcagtggggggcgtctctcccgttttcccaggtttgtcaacgtgactgtgacccccgaggaccagtgtcgccccaacaacgtgtgcaccggtgtgctcacccgccgcggtggcatctgcaatggggacgggggcacccccctcgtctgcgagggcctggcccacggcgtggcctccttttccctggggccctgtggccgaggccctgacttcttcacccgagtggcgctcttccgagactggatcgatggtgttctcaacaacccgggaccggggccagcctaggggggcctgtgacctcccatggagcccagccccgccctccacacctccggcgctccgcacccacctcccacggccccgcccctgcccccgctccggccagaggggccctggctgtaataaagaagccgatctctcctctg

SEQ ID NO: 56 - protein, 251 aa, Homo sapiens
MTRLTVLALLAGLLASSRAGSSPLLDIVGGRKARPRQFPFLASIQNQGRHFCGGALIHARFVMTAASCFQSQNPGVSTVVLGAYDLRRRERQSRQTFSISSMSENGYDPQQNLNDLMLLQLDREANLTSSVTILPLPLQNATVEAGTRCQVAGWGSQRSGGRLSRFPRFVNVTVTPEDQCRPNNVCTGVLTRRGGICNGDGGTPLVCEGLAHGVASFSLGPCGRGPDFFTRVALFRDWIDGVLNNPGPGPA

SEQ ID NO: 57 - DNA, 3885 bp, Homo sapiens
  CDS (88)..(1125)
aggccggggcggggctgggaagtagtcgggcggggttgtgagacgccgcgctcagcttccatcgctgggcggtcaacaagtgcgggcctggctcagcgcgggggggcgcggagaccgcgaggcgaccgggagcggctgggttcccggctgcgcgcccttcggccaggccgggagccgcgccagtcggagcccccggcccagcgtggtccgcctccctctcggcgtccacctgcccggagtactgccagcgggcatgaccgacccaccaggggcgccgccgccggcgctcgcaggccgcggatgaagaagaaaacccggcgccgctcgacccggagcgaggagttgacccggagcgaggagttgaccctgagtgaggaagcgacctggagtgaagaggcgacccagagtgaggaggcgacccagggcgaagagatgaatcggagccaggaggtgacccgggacgaggagtcgacccggagcgaggaggtgaccagggaggaaatggcggcagctgggctcaccgtgactgtcacccacagcaatgagaagcacgaccttcatgttacctcccagcagggcagcagtgaaccagttgtccaagacctggcccaggttgttgaagaggtcataggggttccacagtcttttcagaaactcatatttaagggaaaatctctgaaggaaatggaaacaccgttgtcagcacttggaatacaagatggttgccgggtcatgttaattgggaaaaagaacagtccacaggaagaggttgaactaaagaagttgaaacatttggagaagtctgtggagaagatagctgaccagctggaagagttgaataaagagcttactggaatccagcagggttttctgcccaaggatttgcaagctgaagctctctgcaaacttgataggagagtaaaagccacaatagagcagtttatgaagatcttggaggagattgacacactgatcctgccagaaaatttcaaagacagtagattgaaaaggaaaggcttggtaaaaaaggttcaggcattcctagccgagtgtgacacagtggagcagaacatctgccaggagactgagcggctgcagtctacaaactttgccctggccgagtgaggtgtagcagaaaaaggctgtgctgccctgaagaatggcgccaccagctctgccgtctctggagcggaatttacctgatttcttcagggctgctgggggcaactggccatttgccaattttcctactctcacactggttctcaatgaaaaatagtgtctttgtgattttgagtaaagctcctatctgttttctccttctgtctctgtggttgtactgtccagcaatccaccttttctggagagggccacctctgcccaaattttcccagctgtttggacctctgggtgctttctttgggctggtgagagctctaatttgccttgggccagtttcaggtttataggccccctcagtcttcagatacatgagggcttctttgctcttgtgatcgtgtagtcccatagctgtaaaaccagaatcaccaggaggttgcacctagtcaggaatattgggaatggcctagaacaaggtgtttggcacataagtagaccacttatccctcattgtgacctaattccagagcatctggctgggttgttgggttctagactttgtcctcacctcccagtgaccctgactagccacaggccatgagataccagggggccgttccttggatggagcctgtggttgatgcaaggcttccttgtccccaagcaagtcttcagaaggttagaacccagtgttgactgagtctgtgcttgaaaccaggccagagccatggattaggaagggcaaagagaaggcaccagaatgagtaaagcaggcaggtggtgaagccaaccataaacttctcaggagtgacatgtgcttccttcaaaggcatttttgttaaccatatccttctgagttctatgtttccttcacagctgttctatccattttgtggactgtcccccacccccaccccatcattgtttttaaaaaattaaggcctggcgcagcagctcatgcctataatcccagcactttgggaggctgaggcgggcggatcacttgaggccaggagtttgagaccagcccaggcaacatagcaaaaccccattctgctttaaaaaaaaaaaaaaaaaaaattagcttggcgtagtggcatgtgcctataatcccagctactggggaggctgaggcacaagaatcatttgaacctgggaggtagaggttgctgtgagccgagattacgcccctgcactccagcctgggtcacagagtgagactccatctcagaaaaaaaaaaaattgagtcaggtgcagtagctccttcctgtagtcccagctacttgggaggctgaggctagaggatcacttgagcccaggagtttgagtctagtctgggcaacatagcaagaccccatctctaaaatttaagtaagtaaaagtagataaataaaaagaaaaaaaaactgtttatgtgctcatcataaagtagaagagtggtttgcttttttttttttttttggattaatgaggaaatcattctgtggctctagtcataatttatgcttaataacattgatagtagccctttgcgctataactctacctaaagactcacatcatttggcagagagagagtcgttgaagtcccaggaattcaggactgggcaggttaagacctcagacaaggtagtagaggtagacttgtggacaaggctcgggtcccagcccaccgcaccccaactttaatcagagtggttcactattgatctatttttgtgtgatagctgtgtggcgtgggccacaacatttaatgagaagttactgtgcaccaaactgccgaacaccattctaaactattcatatatattagtcatttaattcttacataacttgagaggtagacagatatccttattttagagatgaggaaaccaagagaacttaggtcattagcgcaaggttgtagagtaagcggcaaagccaagacacaaagctgggtggtttggtttcagagccagtgcttttcccctctactgtactgcctctcaaccaacacagggttgcacaggcccattctctgatttttttcctcttgtcctctgcctctccctctagctcccacttcctctctgctctagttcattttctttagagcagcccgagtgatcatgaagtgcaaatcttgccatgtcagtcccctgcttagaaccctccaatggctcactttctctttaggcaaaagtctttaccccatgccttctcccatctcatctcaaccccctcatttgttggctgtctgctgtcagccactcttctttcaggtcctcagatgcactgcaccctctcctgcctgggggtctttgctcctgctactacctctgcttgaacagctcctcaccttccttcctccaaccctacccttgtataggtgacttttgttcatccttcagaattcaactcacatgtctcttgcatggagaaccctcacctactgtgttgagaccctgtccagcccccaggtgggatcctctctcgacttcccatacatttctttcacagcatttacatagtccatgatagtttacttgtgggattatttggttaatctttgcctttaacaccagggttccttgggtgaaggagcttctttatcttggtaacagcattatttcaagcataacttgtaatatagttatattacatatataacatatatatatataacataacatatataacatatataacaagcataacttgttatatagtcttgtatatagtaagacctcaataaatatttggagaacaaaaaaaaaaaaaaa

SEQ ID NO: 58 - protein, 345 aa, Homo sapiens
MAQRGGARRPRGDRERLGSRLRALRPGREPRQSEPPAQRGPPPSRRPPARSTASGHDRPTRGAAAGARRPRMKKKTRRRSTRSEELTRSEELTLSEEATWSEEATQSEEATQGEEMNRSQEVTRDEESTRSEEVTREEMAAAGLTVTVTHSNEKHDLHVTSQQGSSEPVVQDLAQVVEEVIGVPQSFQKLIFKGKSLKEMETPLSALGIQDGCRVMLIGKKNSPQEEVELKKLKHLEKSVEKIADQLEELNKELTGIQQGFLPKDLQAEALCKLDRRVKATIEQFMKILEEIDTLILPENFKDSRLKRKGLVKKVQAFLAECDTVEQNICQETERLQSTNFALAE

SEQ ID NO: 59 - DNA, 2575 bp, Homo sapiens
  CDS (367)..(1068)
ggaggaggaagcaagcgagggggctggttcctgagcttcgcaattcctgtgtcgccttctgggctcccagcctgccgggtcgcatgatccctccggccggagctggtttttttgccagccaccgcgaggccggctgagttaccggcatccccgcagccacctcctctcccgacctgtgatacaaaagatcttccgggggctgcacctgcctgcctttgcctaaggcggatttgaatctctttctctcccttcagaatcttatcttggctttggatcttagaagagaatcactaaccagagacgagactcagtgagtgagcaggtgttttggacaatggactggttgagcccatccctattataaaaatgtctcagagcaaccgggagctggtggttgactttctctcctacaagctttcccagaaaggatacagctggagtcagtttagtgatgtggaagagaacaggactgaggccccagaagggactgaatcggagatggagacccccagtgccatcaatggcaacccatcctggcacctggcagacagccccgcggtgaatggagccactggccacagcagcagtttggatgcccgggaggtgatccccatggcagcagtaaagcaagcgctgagggaggcaggcgacgagtttgaactgcggtaccggcgggcattcagtgacctgacatcccagctccacatcaccccagggacagcatatcagagctttgaacaggtagtgaatgaactcttccgggatggggtaaactggggtcgcattgtggcctttttctccttcggcggggcactgtgcgtggaaagcgtagacaaggagatgcaggtattggtgagtcggatcgcagcttggatggccacttacctgaatgaccacctagagccttggatccaggagaacggcggctgggatacttttgtggaactctatgggaacaatgcagcagccgagagccgaaagggccaggaacgcttcaaccgctggttcctgacgggcatgactgtggccggcgtggttctgctgggctcactcttcagtcggaaatgaccagacactgaccatccactctaccctcccacccccttctctgctccaccacatcctccgtccagccgccattgccaccaggagaaccactacatgcagcccatgcccacctgcccatcacagggttgggcccagatctggtcccttgcagctagttttctagaatttatcacacttctgtgagacccccacacctcagttcccttggcctcagaattcacaaaatttccacaaaatctgtccaaaggaggctggcaggtatggaagggtttgtggctgggggcaggagggccctacctgattggtgcaacccttaccccttagcctccctgaaaatgtttttctgccagggagcttgaaagttttcagaacctcttccccagaaaggagactagattgcctttgttttgatgtttgtggcctcagaattgatcattttccccccactctccccacactaacctgggttccctttccttccatccctaccccctaagagccatttaggggccacttttgactagggattcaggctgcttgggataaagatgcaaggaccaggactccctcctcacctctggactggctagagtcctcactcccagtccaaatgtcctccagaagcctctggctagaggccagccccacccaggagggagggggctatagctacaggaagcaccccatgccaaagctagggtggcccttgcagttcagcaccaccctagtcccttcccctccctggctcccatgaccatactgagggaccaactgggcccaagacagatgccccagagctgtttatggcctcagctgcctcacttcctacaagagcagcctgtggcatctttgccttgggctgctcctcatggtgggttcaggggactcagccctgaggtgaaagggagctatcaggaacagctatgggagccccagggtcttccctacctcaggcaggaagggcaggaaggagagcctgctgcatggggtggggtagggctgactagaagggccagtcctgcctggccaggcagatctgtgccccatgcctgtccagcctgggcagccaggctgccaaggccagagtggcctggccaggagctcttcaggcctccctctctcttctgctccacccttggcctgtctcatccccaggggtcccagccaccccgggctctctgctgtacatatttgagactagtttttattccttgtgaagatgatatactatttttgttaagcgtgtctgtatttatgtgtgaggagctgctggcttgcagtgcgcgtgcacgtggagagctggtgcccggagattggacggcctgatgctccctcccctgccctggtccagggaagctggccgagggtcctggctcctgaggggcatctgcccctcccccaacccccaccccacacttgttccagctctttgaaatagtctgtgtgaaggtgaaagtgcagttcagtaataaactgtgtttactcagtgaaaaaaaaaaaaaaaaaa

SEQ ID NO: 60 - protein, 233 aa, Homo sapiens
MSQSNRELVVDFLSYKLSQKGYSWSQFSDVEENRTEAPEGTESEMETPSAINGNPSWHLADSPAVNGATGHSSSLDAREVIPMAAVKQALREAGDEFELRYRRAFSDLTSQLHITPGTAYQSFEQVVNELFRDGVNWGRIVAFFSFGGALCVESVDKEMQVLVSRIAAWMATYLNDHLEPWIQENGGWDTFVELYGNNAAAESRKGQERFNRWFLTGMTVAGVVLLGSLFSRK

SEQ ID NO: 61 - DNA, 3060 bp, Homo sapiens
  CDS (282)..(1634)
gggagtggccgctctaggcagcggggaggtcgcggggttgaggggggttgtgaaaggagagcggcctctcctctatggtcacggggccggggcacgcttcccccactctgtcttgttacttccggtagcgaagcctctccctcttcctctgctcccgcggggtctgtgctgagaataatggcccggttggcccgggacgagtggaatgattaatgatgttttgcagcagttttctacgtctgaaattttttatgtctctggaacccagaatttgctaagagatggaggaacctcagaaaagctatgtgaacacaatggaccttgagagagatgaacctctcaaaagcaccggccctcagatttctgttagtgaattttcttgccactgctgctacgacatcctggttaaccccaccaccttgaactgtgggcacagcttctgccgtcactgccttgctttatggtgggcatcttcaaagaaaacagaatgtccagaatgcagagaaaaatgggaaggtttccccaaagtcagtattctcctcagggatgccattgaaaagttatttcctgatgccattagactgagatttgaagacattcagcagaataatgacatagtccaaagtcttgcagcctttcagaaatatgggaatgatcagattcctttagctcctaacacaggccgagcgaatcagcagatgggagggggattcttttccggtgtgctcacagctttaactggagtggcagtggtcctgctcgtctatcactggagcagcagggaatctgaacacgacctcctggtccacaaggctgtggccaaatggacggcggaagaagttgtcctctggctggagcagctgggcccttgggcatctctttacagggaaaggtttttatctgaacgagtaaatggaaggttgcttttaactttgacagaggaagaattttccaagacgccctataccatagaaaacagcagccacaggagagccatcctcatggagctagaacgtgtcaaagcattaggcgtgaagcccccccagaatctctgggaatataaggctgtgaacccaggcaggtccctgttcctgctatacgccctcaagagctcccccaggctgagtctgctctacctgtacctgtttgactacaccgacaccttcctacctttcatccacaccatctgccctctgcaagaagacagctctggggaggacatcgtcaccaagcttctggatcttaaggagcctacgtggaagcagtggagagagttcctggtcaaatactccttccttccataccagctgattgctgagtttgcttgggactggttggaggtccattactggacatcacggtttctcatcatcaatgctatgttactctcagttctggaattattctccttttggagaatctggtcgagaagtgaactgaagaccgtgcctcagaggatgtggagccatttctggaaagtatcaacgcaggggctttttgtggccatgttctggcccctcatccctcagtttgtttgcaactgtttgttttactgggccctgtactttaacccaattattaacattgatcttgtggtcaaggaactccggcggctggaaacccaggtgttgtgactggcactgcccaggctgagactcttcaagtcccgctgacgtctgagctttgatgcttaagaggggtgaggcagggagcggacttcctattttctaccctcagtaaaacaaggtgctgctttgtatatcaaaagctccaaccatgtcctctccccctcagcctgtgggtggcacgagcaaggactgacatccgcacagggaggattgtctgtttggctgacacagcagcagcccttcccacccagccaccttcctcacagggactaggaggctcagtccccaacggctggcaagactcagggtcctcagtggacatggtgtgggtgacatcagaagggtgccacatcagtcccctccccaacctcagtgactgacagaggatccggatctcagagcctgagaccaggtttattggggcctggcctgtcctctaagtcaagtttaggaaaacaaggataagattctgtcataggcatagagagttgcacataaaaaataccgaagaaaacccaaaattcaatcaacaattctgtcttattgaagagttgctaggattcagagtaaaactcaaaggattcagtttgagcctagaatgatggttagacttgtagtcactgggcttttgttttgctttatggaaatcattgaaggtctggatccctttctctgaatggagagattgagagggatgtcgggcagttcccattagatttagtggccttcatgttattcagaattgttttggtgatacctcacccctgtaatcccagcactttgggtgggtgaggcaggcggatcacttgaagccaggacttcaagaccagcttggccaacatggtgaaacctcatctctactaaaaatacaaaaattagccaagtgtgatggcacatacctgtaatcccagctacttggaattggaaatcgcctgaacccaggaggcggaggttgcagggagggagactgcaccactgcacttcagcctgggtgacagagggagactctgtcttaaaaaaaaaaaaaaaatcatctgtaaaataaattccgggatagtcgttttgttcaaggaaatgttttgtaaattgagctcacactatataatctttattgtcctatcctgatgtataatacagcaggtataattacaccaagcgctatagttataaatatggcatgaagtgaactatggccttttatttccttccagtgtgaacacagcaggtgtgagatgtcatcttggaagacaggccttgcagaaataggcctacatccaaaatattatcttgtgactccatgaaccattcattaaccctttgtatctttgagtgaaaattttactcaaaagttgcatctggaagttcgaagaaattacttgaaataaaaataaagatttctatatagataaaacctaaaaaaaaaaaaaaaaaa

SEQ ID NO: 62 - protein, 450 aa, Homo sapiens
MEEPQKSYVNTMDLERDEPLKSTGPQISVSEFSCHCCYDILVNPTTLNCGHSFCRHCLALWWASSKKTECPECREKWEGFPKVSILLRDAIEKLFPDAIRLRFEDIQQNNDIVQSLAAFQKYGNDQIPLAPNTGRANQQMGGGFFSGVLTALTGVAVVLLVYHWSSRESEHDLLVHKAVAKWTAEEVVLWLEQLGPWASLYRERFLSERVNGRLLLTLTEEEFSKTPYTIENSSHRRAILMELERVKALGVKPPQNLWEYKAVNPGRSLFLLYALKSSPRLSLLYLYLFDYTDTFLPFIHTICPLQEDSSGEDIVTKLLDLKEPTWKQWREFLVKYSFLPYQLIAEFAWDWLEVHYWTSRFLIINAMLLSVLELFSFWRIWSRSELKTVPQRMWSHFWKVSTQGLFVAMFWPLIPQFVCNCLFYWALYFNPIINIDLVVKELRRLETQVL

SEQ ID NO: 63 - DNA, 10640 bp, Homo sapiens
  CDS (466)..(1908)
atactcagtcacacaagccatagcaggaaacagcgagcttgcagcctcaccgacgagtctcaactaaaagggactcccggagctaggggtggggactcggcctcacacagtgagtgccggctattggacttttgtccagtgacagctgagacaacaaggaccacgggaggaggtgtaggagagaagcgccgcgaacagcgatcgcccagcaccaagtccgcttccaggctttcggtttctttgcctccatcttgggtgcgccttcccggcgtctaggggagcgaaggctgaggtggcagcggcaggagagtccggccgcgacaggacgaactcccccactggaaaggattctgaaagaaatgaagtcagccctcagaaatgaagttgactgcctgctggctttctgttgactggcccggagctgtactgcaagacccttgtgagcttccctagtctaagagtaggatgtctgctgaagtcatccatcaggttgaagaagcacttgatacagatgagaaggagatgctgctctttttgtgccgggatgttgctatagatgtggttccacctaatgtcagggaccttctggatattttacgggaaagaggtaagctgtctgtcggggacttggctgaactgctctacagagtgaggcgatttgacctgctcaaacgtatcttgaagatggacagaaaagctgtggagacccacctgctcaggaaccctcaccttgtttcggactatagagtgctgatggcagagattggtgaggatttggataaatctgatgtgtcctcattaattttcctcatgaaggattacatgggccgaggcaagataagcaaggagaagagtttcttggaccttgtggttgagttggagaaactaaatctggttgccccagatcaactggatttattagaaaaatgcctaaagaacatccacagaatagacctgaagacaaaaatccagaagtacaagcagtctgttcaaggagcagggacaagttacaggaatgttctccaagcagcaatccaaaagagtctcaaggatccttcaaataacttcaggctccataatgggagaagtaaagaacaaagacttaaggaacagcttggcgctcaacaagaaccagtgaagaaatccattcaggaatcagaagcttttttgcctcagagcatacctgaagagagatacaagatgaagagcaagcccctaggaatctgcctgataatcgattgcattggcaatgagacagagcttcttcgagacaccttcacttccctgggctatgaagtccagaaattcttgcatctcagtatgcatggtatatcccagattcttggccaatttgcctgtatgcccgagcaccgagactacgacagctttgtgtgtgtcctggtgagccgaggaggctcccagagtgtgtatggtgtggatcagactcactcagggctccccctgcatcacatcaggaggatgttcatgggagattcatgcccttatctagcagggaagccaaagatgttttttattcagaactatgtggtgtcagagggccagctggaggacagcagcctcttggaggtggatgggccagcgatgaagaatgtggaattcaaggctcagaagcgagggctgtgcacagttcaccgagaagctgacttcttctggagcctgtgtactgcggacatgtccctgctggagcagtctcacagctcaccatccctgtacctgcagtgcctctcccagaaactgagacaagaaagaaaacgcccactcctggatcttcacattgaactcaatggctacatgtatgattggaacagcagagtttctgccaaggagaaatattatgtctggctgcagcacactctgagaaagaaacttatcctctcctacacataagaaaccaaaaggctgggcgtagtggctcacacctgtaatcccagcactttgggaggccaaggagggcagatcacttcaggtcaggagttcgagaccagcctggccaacatggtaaacgctgtccctagtaaaaatacaaaaattagctgggtgtgggtgtgggtacctgtattcccagttacttgggaggctgaggtgggaggatcttttgaacccaggagttcagggtcatagcatgctgtgattgtgcctacgaatagccactgcataccaacctgggcaatatagcaagatcccatctctttaaaaaaaaaaaaaaaggacaggaactatcttactcaatgtattagtcatgtttctctagagggacagaactaataggatacatgtatataaaaaggggagtttattaaggagtattgactcacatgatcacagggttaggtcccacaataggtcatctgcaagcaaggaagccaattcaagtcccaaagctgaagaacttggagtccaatgtttgagggcaggaagcattcagcatgagagaaagatggaggccagaagactacaccagtctagtctttccatgttttgcctgcttttattctggcagtgctggcagctgattagatggtgcccacccagattgaggatggtctgcctttcccagtccactgactcaaatgttaaatctcctttggcagcaccctcacagatgtacccgggaacactttgcatccttctattcaatcaagttgatactcagtattaaccatcacagtccatttgggcaactataccaaattaccatagaccaggtgacttaaacagcagttatttctcacagttccggaggctgggaaatccaacatctaagtggtagcatatctggtgtctggtaaggcatgcttccagatcttaccagatgtcagtcttttgatgttctcacatggcagaaaaagaggatgcaaactctcaagtatatctttaagggcacaaattccattcatgagggctctaccctcatcacctaattacctcccaaaggccccaccttctgatactgtcactttggggatactgtctcccctttgaattctggggggaatacaaacattcagtttgtaacaatagccttatgatttagaggttacttgttcattcacctagacctcaaattgcattttacagctagtcaagtatatctttctctgatttgatagtgtgacctaaaaggggaccattgtttgaaatatcattagagttgcttattattattattattattattattattattattattattattattgagacagagtttcattctgctgcccaggctggagtgcagtggcatcatcttggctcattgcaacctctgccttctgggttcaagcgattctcctgcctcagcctcccgagtagctgggattacaggctcctgccaccacacccggctaatttttgtatttttagtggagacagggtttccaccatgttggccagcgtggtcttgaactcctgacctcaggtgattcaccagcctcggcctcccaaagtgctgggattacaggtgtgagccactgcacctggcctattattatttttaaattttttttttttaattgatcattcttgggtgtttctcacagagggtgatttggcagggtcacaggacaatagtggagggaaggtcagcagataaacaagtgaacaaaggtctctggttttcctaggcagaggaccctgcggccttccgcagtgtttgtgtccctgggtacttgagattagggagtggtgatgactcttaaggagcatgctgccttcaagcatctgtttaacaaagcacatcttgcactgcccttaatccatttaaccctgagtggacacagcacatgtttcagagagcacagggttgggggtaaggtcatagatcaacagcatcctaaggcagaagaatttttcttagtacagaacaaaatgaagtctcccatgtctacttctttctacacagacacagcaacaatctgatttctctatcttttccccacctttcccccttttctattccacaaaaccgccatcgtcatcatggcctgttctcaatgagctgttgggtacacctcccagacggggtggcggctgggcagaggggctcctcacttcccagatggggcggccaggcggacgcgccccccacctccctcccggacgggatagctggccgggcgggggctgaccccccacctccctccccgacggggcggctggccgggcgggggctgacccccacgcctccctcccggacggggcggctgccaggcggaggggctcctcacttctcagacggggtggctgctgggcggagacgctcctcacttcccagacagggtggctgtcgggcggaggggctcctcacttctcagacggggcagctgcgggcggaggggctcctcacttctcagacggggtggccgggcagagaagctcctcacatcccagacgggggggcggggcagaggcgctccccacatctcagacgatgggcggccgggcagagacgctcctcacttcatcccagacggggtggcggccgggcagaagctgtaatctcggcaccctggggggccaaggcaggcggctgggaggcggaggccgtagccagctgagatcacaccactgcactccagcctgggcaacattgagcactgagtggacgagactctgcccgcaatcccggcacctcgggaggccgaggctggcagatcactcgcagtcaggagctggagaccagcccggccaacacagtgaaaccctgtctccaccaaaaaaatacgaaaaccagtcaggcgtggcggcgcccgcaatggcaggcacgcggcaggccgaggcgggagaatcaggcagggaggctgcagtgagccgagatggcagcagtacagtccagcttcggctcggcatcagagggagaccgtggggagagggagaagagagggagggggagagggctatttttaaaattttttaaaattgctgaacaggggtacctctgggcagtgtgtcagaataccactttttaaatattttatgatttatttatttttctatttcttgaggttttaactgatgtgtatctgtatgtctatttgtgtatattttgtcatgatcatgtaacagagtctgaaaagtgtcgaagagacagttttcaggaacaacaagcaattattcctactttccaagttattttgatgccatggtggctcatacctataatctgagtactttgggaggctgaggtggactgatcacttgagcccaggagtttgagaccagcctgggcaacatagcaagactccatctctacaaaaaaagacaaaatttagctgagcgtggtggcgtgttcctgtagtcccagctacttgggaggctgaagtgagtggatcccctgagcccagagaggtcaaggttgtgatgagctgtgatcacaccactgcacttcagcatgggagacagagtgagaccctgtttcagaaaaaataaataaataaaaccaccagcaccacaaacaacaacaaaaagttattttgtacttgttttgagcacaggactcctgagggtatctttgcatttaatattacataggggtgccagtgggaagtaatgtgtatgcttggcctcatgagctaaaaccctgtgttaattatgacagaaggaaagtgtgtgagagagatcttaactacctagcagctctagctgccatcttgaaccatgaagatacgggccacacgtaggggtagctgggtagtgagcagcaagaagccttgttggatgagggcacgaaggagcagaatcactggaatcactgtgtcagccctaattacctacctctggacttttatgtgaggggaaaaaaaattgacagtttatatttatctcaacctagttaacccaagtgatgcattgttatgagattaaaatgtttggaggccgggtgcggtggctcacgcctataatcccagccctttgggaggccaaggcgggcggatcacgaggtcaggagatcaagaccatcctggctaacatgtaaaaccccgtctctactaaaaatacaaaaaattagccaggcgttgtggcggtcgcctgtagtccctgctatttgggaggccgaggcaagagaacggcatgaacctgggaggtggagcttgcagcgagctgagatcttgccactgcactccagcctgggcgacagtgcgagactctgtctcaaaaataaataaataaataaataataaataaaatgtttggaatgttggcttcatccctgggatgcaaggctggttcaacatacgcaaatcaagaaacataattcatcacataaacagaactaaagacaaaaaccacatgattatctcaatagatacagaaaaggccttcaataaaattcaacgttgcttcatgttaaaaactctcaataaactaggtattgatggaaaatatctcaaaataataaccatttatgacaaacccacagccattatcatactgaatgggcaaaagctggaagcattccccttgaaaactggcacaagacagggatgccgtctcaccactcctatttaacatagtattggaagttctggccaagaaaatcaggcaagagaaacaaataaggggtattcaaataggaaaagaggaagtaaaactgtgtttgcagatgacatgatactatatctagaaaaccccattatctccacccaaaagttccttaagctgataagcaacttcagcaaagtctcaggatacaaaatcaatgtgcagaaatcacaagcattctatacaccaacaatacacaagcagagagccaaatcatgaatgaactcccattcacagttgctagaaagagaataaaatacctaggaatacagctaataagatgtgaaggatctcttcaaggagaactacaaaccactgctcaaggaaataagagaggacacaaatgaaaaaacattccattctcgtggataggaagaatcaatatcatgaaaatggccatactacccaaagtaatttataggttcattgctattcccattaaactactattgacattcttcacagaattagaaaaaaactactttaaaattcaaatggaaccaaaaaagagcccgtataaccaagacaacaataagcaaaaagaacaaagctggaagcatcacactacccaacttcaaagtatactgcaaggctacagtagccaaaatggcatggtactggtacaaaaacagacacatagaccaatggaacagaatagagaccagagaaagaagaccacacatctacagccatctgatcatcgacaaacctgacaaaaacaagcaatggggaaaagattccctatttaataaatggtgctgggaaaactggctagccatatgcagaaaattgaaactgaccccttccttacaccttatacaaaaattaactcaagattaaagacttaatgtaaaacctaaaactataaaaaccctagaagaaaatctatttaataccattcaagacataggcacaagcaaaggtttcatgacaaaaacatcaaaagcaattgcaacaaaagcaaaaattacaaatgggatctaattaaactaaagagctcctgcacagcaaaagaaactatcattagagtgaacaggcaacctacagaatgggagaacatttttgcaatctatccatctgacaaaggtctaatatccagaacctacaaggaacttaaaacaaatttacaaggaaaaaaacaaccccatcaaaaagtggacaaaggacatgaacagacacttctcaaaagaagacatttatgtggccaacaaacatataaaaaaaagctcaaccttactgatcattagagaaatgcaaaggagaaccacaatgagataccatctcatgccggtcagaatggtgattattaaaaagtcaaaaaacaacagatgctggcgaggctgtggagaagtaggaacacttttacattgttggtgggaatgtaaattagttcaaccgttgtggaagtgtgtgtggctattcctcaaagatctagaactagaaatactatttgtcccagcaatcccattactgggtatatacccaaaggaatataaaccattttattataaagatacatgcacatttttgttcattgcagcactcttcacaatagcaaagacacaatagcaaatgcccatcaaagatagactggataaagaaaatgtggtacatatacaccatggaatactgtgcagtgcagccattacagcttttggtgatacagtgaatcagatttttcattaattcttttaattggttattactgaacgtgaaaaagtaatgtttgtattgaaatcttgagtctggccatgtttctattttaaattcataaagaattctaacaagaggaattccaagaatgtcataaatggatgtttctccatggatgaaggaactgttttattcacttgctgataattcagcctaatccagtttgacatcatatagataagtagttgaattatggatttaaaatacatatcattttctaactccaaaggtaatacttatttaaatggttttgaaaatatagaaaggcacaatttctttttaaatctgttattctccaccaccactcaatctgtctatcatctatctctccattcattcttccatttgtttatatctgttaatctttgtatgtgttcatgtatagcttttacatgattggaatcataatgcatattccattttgaagtctgcttttttttacacaaaaatatgttgtgaatattttcctatattatgaaatatcattagctgagcttttagaattgactgcatgttttggtaccatttagatatagtttaagatacttagaagttatgtggctttgccactatggatgaatcttatttactcaatattaattacttacaaataacctcacctaaacactactcagccataaaaaggaatgaattaatgacattcacagcaacctggagactattactctaaaggaagtaactgaggaatggaaaaccaaacattgtatgttctcactcataagtgggagataagctatgaggatgcaaaggcataagaaggatacaatggactttggggacttaggggaaagggtgggaggggggtgaaggataaaagaatacaaattgggttcagtgtatactgctcaggtgatgggtgcaccagaatctcacaagtaaccacttaattacttacgcatgtaaccagataccacctgttccccaaacacctatggaaataattttgtttttttttttaaaaaaggaatgagatcatgtcctttgcagggacatggatgaagctggaagccattatcctcagcaaactaacagaggagcaggaaaccaaacaccacatgttctcacttgtaagcggaagctgaacaatgagaacacacggacacagggatgagatcaacacacactggggcctgatgcaggggccgtagcggggagagcatcaggataactagctaatgcatgtggggcttaatacctaggtgataggttgataggtgcagcaaaccaccatgggacacgtttacctatgtaacaaacccgcacatcctgcacttgtatccagaacttaaaatattttaaaaatctttagagaatacaaaaaaaaaaaaaaagattcttcaatgcatacacaataaaattgcagttcagtcaaacattggaagtctttctctgactgtctagttggtatcttcattttcagcttcttcaagatcccactccaaacactgttagctcagccaaattgaacagctcatatctcctacctctggatctttggttctggtgattgtatatttctggaccatctggaaccccagcatatcaccctaccccacatctccacatccccaaaatataaccatacttcaagggcagttcaaataccatctccttctatcctccatgaagtcagttatctcttccattggaattatcgccccctctcctgaacagtactatttcgtgtgaatctcctccaagccttcttttcattttatatctcatgctgtaattcttggaaagtatgctgtagctcaagtgcagaattctcatcagttttatctttatatctctcctaaacactttacctgatgaagagcctggcatacacataaatatatattgaatgaatcagtgatggattgaaaagagaaatgatggatctcctaaattttaacttttataaaatattttgatacattcatgaccttactttagcaagcaatgaacgtgatgtaaactattgttgatatagtttttatattggaagtgtaagtagtttgtggcatgggattgtgacatatcctaggtttcctcatcttctttttattgaaatgtaattcacaagccataaaatttgcccctttaaagtaaatgatgcagtggattttagtatatttacagagttgtgcaatcatcaccactatctaattccagaacatttccatctacctagaaactccataccagtgagctgccactctaatcctcctcttcccccagcctctagaaacaataatccattttctgtctctatgatttgcctgttctagatattttataaaaataaacatgtggcctttcgtgtctgacttccttcacttaaaaaaaaaaaaaaaaaa

SEQ ID NO: 64 - protein, 480 aa, Homo sapiens
MSAEVIHQVEEALDTDEKEMLLFLCRDVAIDVVPPNVRDLLDILRERGKLSVGDLAELLYRVRRFDLLKRILKMDRKAVETHLLRNPHLVSDYRVLMAEIGEDLDKSDVSSLIFLMKDYMGRGKISKEKSFLDLVVELEKLNLVAPDQLDLLEKCLKNIHRIDLKTKIQKYKQSVQGAGTSYRNVLQAAIQKSLKDPSNNFRLHNGRSKEQRLKEQLGAQQEPVKKSIQESEAFLPQSIPEERYKMKSKPLGICLIIDCIGNETELLRDTFTSLGYEVQKFLHLSMHGISQILGQFACMPEHRDYDSFVCVLVSRGGSQSVYGVDQTHSGLPLHHIRRMFMGDSCPYLAGKPKMFFIQNYVVSEGQLEDSSLLEVDGPAMKNVEFKAQKRGLCTVHREADFFWSLCTADMSLLEQSHSSPSLYLQCLSQKLRQERKRPLLDLHIELNGYMYDWNSRVSAKEKYYVWLQHTLRKKLILSYT

SEQ ID NO: 65 - DNA, 822 bp, Homo sapiens
  CDS (56)..(517)
agttccctatcactctctttaatcactactcacagtaacctcaactcctgccacaatgtacaggatgcaactcctgtcttgcattgcactaagtcttgcacttgtcacaaacagtgcacctacttcaagttctacaaagaaaacacagctacaactggagcatttactgctggatttacagatgattttgaatggaattaataattacaagaatcccaaactcaccaggatgctcacatttaagttttacatgcccaagaaggccacagaactgaaacatcttcagtgtctagaagaagaactcaaacctctggaggaagtgctaaatttagctcaaagcaaaaactttcacttaagacccagggacttaatcagcaatatcaacgtaatagttctggaactaaagggatctgaaacaacattcatgtgtgaatatgctgatgagacagcaaccattgtagaatttctgaacagatggattaccttttgtcaaagcatcatctcaacactgacttgataattaagtgcttcccacttaaaacatatcaggccttctatttatttaaatatttaaattttatatttattgttgaatgtatggtttgctacctattgtaactattattcttaatcttaaaactataaatatggatcttttatgattctttttgtaagccctaggggctctaaaatggtttcacttatttatcccaaaatatttattattatgttgaatgttaaatatagtatctatgtagattggttagtaaaactatttaataaatttgataaatataaaaaaaaaaaaaaaaaaaaaaaaaa

SEQ ID NO: 66 - protein, 153 aa, Homo sapiens
MYRMQLLSCIALSLALVTNSAPTSSSTKKTQLQLEHLLLDLQMILNGINNYKNPKLTRMLTFKFYMPKKATELKHLQCLEEELKPLEEVLNLAQSKNFHLRPRDLISNINVIVLELKGSETTFMCEYADETATIVEFLNRWITFCQSIISTLT

SEQ ID NO: 67 - DNA, 5046 bp, Homo sapiens
  CDS (259)..(2733)
cgaggctccgtgccccgccccccgggtgccccgcccctttgcgcggctggcgcggccagcaggccaggctcccctcggcaaacctgtctaattggggcggggagcggagcttcctcctctgagggccgtgccgcgctgccagatttgttcttccgcccctgcctccgcggctcggaggcgagcggaaggtgccccggggccgaggcccgtgacggggcgggcgggagccccggcagtccggggtcgccggcgagggccatgtcgctgttgggggacccgctacaggccctgccgccctcggccgcccccacggggccgctgctcgcccctccggccggcgcgaccctcaaccgcctgcgggagccgctgctgcggaggctcagcgagctcctggatcaggcgcccgagggccggggctggaggagactggcggagctggcggggagtcgcgggcgcctccgcctcagttgcctagacctggagcagtgttctcttaaggtactggagcctgaaggaagccccagcctgtgtctgctgaagttaatgggtgaaaaaggttgcacagtcacagaattgagtgatttcctgcaggctatggaacacactgaagttcttcagcttctcagccccccaggaataaagattactgtaaacccagagtcaaaggcagtcttggctggacagtttgtgaaactgtgttgccgggcaactggacatccttttgttcaatatcagtggttcaaaatgaataaagagattccaaatggaaatacatcagagcttatttttaatgcagtgcatgtaaaagatgcaggcttttatgtctgtcgagttaataacaatttcacctttgaattcagccagtggtcacagctggatgtttgcgacatcccagagagcttccagagaagtgttgatggcgtctctgaatccaagttgcaaatctgtgttgaaccaacttcccaaaagctgatgccaggcagcacattggttttacagtgtgttgctgttggaagccctattcctcactaccagtggttcaaaaatgaattaccattaacacatgagaccaaaaagctatacatggtgccttatgtggatttggaacaccaaggaacctactggtgtcatgtatataatgatcgagacagtcaagatagcaagaaggtagaaatcatcataggaagaacagatgaggcagtggagtgcactgaagatgaattaaataatcttggtcatcctgataataaagagcaaacaactgaccagcctttggcgaaggacaaggttgcccttttgataggaaatatgaattaccgggagcaccccaagctcaaagctcctttggtggatgtgtacgaattgactaacttactgagacagctggacttcaaagtggtttcactgttggatcttactgaatatgagatgcgtaatgctgtggatgagtttttactccttttagacaagggagtatatgggttattatattatgcaggacatggttatgaaaattttgggaacagcttcatggtccccgttgatgctccaaatccatataggtctgaaaattgtctgtgtgtacaaaatatactgaaattgatgcaagaaaaagaaactggacttaatgtgttcttattggatatgtgtaggaaaagaaatgactacgatgataccattccaatcttggatgcactaaaagtcaccgccaatattgtgtttggatatgccacgtgtcaaggagcagaagcttttgaaatccagcattctggattggcaaatggaatctttatgaaatttttaaaagacagattattagaagataagaaaatcactgtgttactggatgaagttgcagaagatatgggtaagtgtcaccttaccaaaggcaaacaggctctagagattcgaagtagtttatctgagaagagagcacttactgatccaatacagggaacagaatattctgctgaatctcttgtgcggaatctacagtgggccaaggctcatgaacttccagaaagtatgtgtcttaagtttgactgtggtgttcagattcaattaggatttgcagctgagttttccaatgtcatgatcatctatacaagtatagtttacaaaccaccggagataataatgtgtgatgcctacgttactgattttccacttgatctagatattgatccaaaagatgcaaataaaggcacacctgaagaaactggcagctacttggtatcaaaggatcttcccaagcattgcctctataccagactcagttcactgcaaaaattaaaggaacatctagtcttcacagtatgtttatcatatcagtactcaggattggaagatactgtagaggacaagcaggaagtgaatgttgggaaacctctcattgctaaattagacatgcatcgaggtttgggaaggaagacttgctttcaaacttgtcttatgtctaatggtccttaccagagttctgcagccacctcaggaggagcagggcattatcactcattgcaagacccattccatggtgtttaccattcacatcctggtaatccaagtaatgttacaccagcagatagctgtcattgcagccggactccagatgcatttatttcaagtttcgctcaccatgcttcatgtcattttagtagaagtaatgtgccagtagagacaactgatgaaataccatttagtttctctgacaggctcagaatttctgaaaaatgacctccttgtttttgaaagttagcataattttagatgcctgtgaaatagtactgcacttacataaagtgagacattgtgaaaaggcaaatttgtatatgtagagaaagaatagtagtaactgtttcatagcaaacttcaggactttgagatgttgaaattacattatttaattacagacttcctctttctaagattttgtgaattggttgaatagttctatacaaatgaagtatggaggtgtgtatgtttatatgtatataacaaaatattttcattgtgaccactctgaagtaagagcaatgggaatggcattattgtagaataagtcattgtatttttaacaccagaaagaaccttgccgatcaccaggcataacctaattttatccatggaagaaacacagaaaggcatctaagttagagctggcaccagaactgagacctccagaaatctattccagtattttttccactacacaactgccttcctgacaggttctgagataagtgttatgtttgtagatagagtgaaatatatttatatatatataaatatatacagatacatatctgtgtattatctcaaggaatgtacaaactttagtttttgattataaggacttcactgcaagttttagttaagaggtttgtatataaatctgttatagaacaggctgaaatttcttgttcataagattatgaaaccacatgagaagtgataaaatgtttgttaaagctagatagaggttaagaatcaagatataatggataattttcatagctgcctatcagaatttcccaaatatttagcatcttccttgataatatgtattttcttcttgaatttcactggcctaatgagataatactcttatctttggctctacctaaaagttggttaaaaatgcaattggcattaacaaggaaaaatactgaattagtaattttaaaagtctcacaaagaaaatcccaggcctagatggctgcattgttgaattctgccaaacattaaaattagcactaattttttgcacactgtttctaaaagtaggagaggaaagaacacttcccaacttactctaggtcagtattaccctgatactagactagacatcacaagaaaactataagccaatattccttattaatacaaacacaaaaatcattaacaaaaatattagcaaactgaatccagcaacctataaaaaggattctatatcatgaccaagtggaatttatcccaggaattcaaggttggttcaacatctaaaaatcaaataagctaatatacagtcagttctcattattcacagtaattatgttctacagaatattctcccataaacactgaattaaatatggaacaactgcttttaggagaaagtgtatttgtgtatatgtgtgtatacatatgtttatctcacacacattatgagcttgaattcttaattcatcctagcaaattctaccttattttacagaagtgaaagtgaggtatcagaagtgttaagtgacatgcctgaggcacccccctaacaggtgtcagagctgaaattcaaaccccatccagctggccccggagccagagcttcttgtactacacagaattgcccctgccatttccaccctccagtcatttctctatgagactgaagcaggaaggcagagcatcatcttgttcagcctcagctgggaacatgtgtactgggtgactcaaatttttcacccatttacacatatccacaaatgactgcaaaagtgccacggatatcaatttgagggttataaattttagcaagttggtaaattcacaaatacataaccttgaataatgaggatcaactgtaccatatttaataaagcacaaaacccacacagattgtcttattacagcatttgataaaatccaaaactctttcataaaaacactcaacaaacttaggaataaaaggaatcttcctagatatgataaatataacatctatgaaaagcccacacctaacattatacttcatggtgatagactgaaggctgaatgttttccccttaagattgggaagaaggacaaggatgttcactcggcactacttctattcagcattgtacttgaagttctagccacagcagttaggttaggaattcaaggtttgttcaacatctaaaaatcaaataagctaataaagaaaagaggtttatactgcaaaagaagtgaaactatatgtattcacagttgatacatagttgtatatagaaaatgctaaagaatccataaaaagtaataaatgagttcaacaggttaaaaaaaaaaaaaaaa

SEQ ID NO: 68 - protein, 824 aa, Homo sapiens
MSLLGDPLQALPPSAAPTGPLLAPPAGATLNRLREPLLRRLSELLDQAPEGRGWRRLAELAGSRGRLRLSCLDLEQCSLKVLEPEGSPSLCLLKLMGEKGCTVTELSDFLQAMEHTEVLQLLSPPGIKITVNPESKAVLAGQFVKLCCRATGHPFVQYQWFKMNKEIPNGNTSELIFNAVHVKDAGFYVCRVNNNFTFEFSQWSQLDVCDIPESFQRSVDGVSESKLQICVEPTSQKLMPGSTLVLQCVAVGSPIPHYQWFKNELPLTHETKKLYMVPYVDLEHQGTYWCHVYNDRDSQDSKKVEIIIGRTDEAVECTEDELNNLGHPDNKEQTTDQPLAKDKVALLIGNMNYREHPKLKAPLVDVYELTNLLRQLDFKVVSLLDLTEYEMRNAVDEFLLLLDKGVYGLLYYAGHGYENFGNSFMVPVDAPNPYRSENCLCVQNILKLMQEKETGLNVFLLDMCRKRNDYDDTIPILDALKVTANIVFGYATCQGAEAFEIQHSGLANGIFMKFLKDRLLEDKKITVLLDEVAEDMGKCHLTKGKQALEIRSSLSEKRALTDPIQGTEYSAESLVRNLQWAKAHELPESMCLKFDCGVQIQLGFAAEFSNVMIIYTSIVYKPPEIIMCDAYVTDFPLDLDIDPKDANKGTPEETGSYLVSKDLPKHCLYTRLSSLQKLKEHLVFTVCLSYQYSGLEDTVEDKQEVNVGKPLIAKLDMHRGLGRKTCFQTCLMSNGPYQSSAATSGGAGHYHSLQDPFHGVYHSHPGNPSNVTPADSCHCSRTPDAFISSFAHHASCHFSRSNVPVETTDEIPFSFSDRLRISEK

SEQ ID NO: 69 - DNA, 4107 bp, Homo sapiens
  CDS (209)..(1261)
gcgcaaccctccggaagctgccgcccctttccccttttatgggaatactttttttaaaaaaaaagagttcgctggcgccaccccgtaggactggccgccctaaaaccgtgataaaggagctgctcgccacttctcacttccgcttccttccagtaaggagtcggggtcttccccagttttctcagccaggcggcggcggcgactggcaatgtttggcctcaaaagaaacgcggtaatcggactcaacctctactgtgggggggccggcttgggggccggcagcggcggcgccacccgcccgggagggcgacttttggctacggagaaggaggcctcggcccggcgagagatagggggaggggaggccggcgcggtgattggcggaagcgccggcgcaagccccccgtccaccctcacgccagactcccggagggtcgcgcggccgccgcccattggcgccgaggtccccgacgtcaccgcgacccccgcgaggctgcttttcttcgcgcccacccgccgcgcggcgccgcttgaggagatggaagccccggccgctgacgccatcatgtcgcccgaagaggagctggacgggtacgagccggagcctctcgggaagcggccggctgtcctgccgctgctggagttggtcggggaatctggtaataacaccagtacggacgggtcactaccctcgacgccgccgccagcagaggaggaggaggacgagttgtaccggcagtcgctggagattatctctcggtaccttcgggagcaggccaccggcgccaaggacacaaagccaatgggcaggtctggggccaccagcaggaaggcgctggagaccttacgacgggttggggatggcgtgcagcgcaaccacgagacggccttccaaggcatgcttcggaaactggacatcaaaaacgaagacgatgtgaaatcgttgtctcgagtgatgatccatgttttcagcgacggcgtaacaaactggggcaggattgtgactctcatttcttttggtgcctttgtggctaaacacttgaagaccataaaccaagaaagctgcatcgaaccattagcagaaagtatcacagacgttctcgtaaggacaaaacgggactggctagttaaacaaagaggctgggatgggtttgtggagttcttccatgtagaggacctagaaggtggcatcaggaatgtgctgctggcttttgcaggtgttgctggagtaggagctggtttggcatatctaataagatagccttactgtaagtgcaatagttgacttttaaccaaccaccaccaccaccaaaaccagtttatgcagttggactccaagctgtaacttcctagagttgcaccctagcaacctagccagaaaagcaagtggcaagaggattatggctaacaagaataaatacatgggaagagtgctccccattgattgaagagtcactgtctgaaagaagcaaagttcagtttcagcaacaaacaaactttgtttgggaagctatggaggaggacttttagatttagtgaagatggtagggtggaaagacttaatttccttgttgagaacaggaaagtggccagtagccaggcaagtcatagaattgattacccgccgaattcattaatttactgtagtgttaagagaagcactaagaatgccagtgacctgtgtaaaagttacaagtaatagaactatgactgtaagcctcagtactgtacaagggaagcttttcctctctctaattagctttcccagtatacttcttagaaagtccaagtgttcaggacttttatacctgttatactttggcttggtttccatgattcttactttattagcctagtttatcaccaataatacttgacggaaggctcagtaattagttatgaatatggatatcctcaattcttaagacagcttgtaaatgtatttgtaaaaattgtatatatttttacagaaagtctatttctttgaaacgaaggaagtatcgaatttacattagtttttttcatacccttttgaactttgcaacttccgtaattaggaacctgtttcttacagcttttctatgctaaactttgttctgttcagttctagagtgtatacagaacgaattgatgtgtaactgtatgcagactggttgtagtggaacaaatctgataactatgcaggtttaaattttcttatctgattttggtaagtattccttagataggtttttctttgaaaacctgggattgagaggttgatgaatggaaattctttcacttcattatatgcaagttttcaataattaggtctaagtggagttttaaggttactgatgacttacaaataatgggctctgattgggcaatactcatttgagttccttccatttgacctaatttaactggtgaaatttaaagtgaattcatgggctcatctttaaagcttttactaaaagattttcagctgaatggaactcattagctgtgtgcatataaaaagatcacatcaggtggatggagagacatttgatcccttgtttgcttaataaattataaaatgatggcttggaaaagcaggctagtctaaccatggtgctattattaggcttgcttgttacacacacaggtctaagcctagtatgtcaataaagcaaatacttactgttttgtttctattaatgattcccaaaccttgttgcaagtttttgcattggcatctttggatttcagtcttgatgtttgttctatcagacttaaccttttatttcctgtccttccttgaaattgctgattgttctgctccctctacagatatttatatcaattcctacagctttcccctgccatccctgaactctttctagcccttttagattttggcactgtgaaacccctgctggaaacctgagtgaccctccctccccaccaagagtccacagacctttcatctttcacgaacttgatcctgttagcaggtggtaataccatgggtgctgtgacactaacagtcattgagaggtgggaggaagtcccttttccttggactggtatcttttcaactattgttttatcctgtctttgggggcaatgtgtcaaaagtcccctcaggaattttcagaggaaagaacattttatgaggctttctctaaagtttcctttgtataggagtatgctcacttaaatttacagaaagaggtgagctgtgttaaacctcagagtttaaaagctactgataaactgaagaaagtgtctatattggaactagggtcatttgaaagcttcagtctcggaacatgacctttagtctgtggactccatttaaaaataggtatgaataagatgactaagaatgtaatggggaagaactgccctgcctgcccatctcagagccataaggtcatctttgctagagctatttttacctatgtatttatcgttcttgatcataagccgcttatttatatcatgtatctctaaggacctaaaagcactttatgtagtttttaattaatcttaagatctggttacggtaactaaaaaagcctgtctgccaaatccagtggaaacaagtgcatagatgtgaattggtttttaggggccccacttcccaattcattaggtatgactgtggaaatacagacaaggatcttagttgatattttgggcttggggcagtgagggcttaggacaccccaagtggtttgggaaaggaggaggggagtggtgggtttatagggggaggaggaggcaggtggtctaagtgctgactggctacgtagttcgggcaaatcctccaaaagggaaagggaggatttgcttagaaggatggcgctcccagtgactactttttgacttctgtttgtcttacgcttctctcagggaaaaacatgcagtcctctagtgtttcatgtacattctgtggggggtgaacaccttggttctggttaaacagctgtacttttgatagctgtgccaggaagggttaggaccaactacaaattaatgttggttgtcaaatgtagtgtgtttccctaactttctgtttttcctgagaaaaaaaaataaatcttttattcaaatacagggaaaaaaaaaaaaaaaaaa

SEQ ID NO: 70 - protein, 350 aa, Homo sapiens
MFGLKRNAVIGLNLYCGGAGLGAGSGGATRPGGRLLATEKEASARREIGGGEAGAVIGGSAGASPPSTLTPDSRRVARPPPIGAEVPDVTATPARLLFFAPTRRAAPLEEMEAPAADAIMSPEEELDGYEPEPLGKRPAVLPLLELVGESGNNTSTDGSLPSTPPPAEEEEDELYRQSLEIISRYLREQATGAKDTKPMGRSGATSRKALETLRRVGDGVQRNHETAFQGMLRKLDIKNEDDVKSLSRVMIHVFSDGVTNWGRIVTLISFGAFVAKHLKTINQESCIEPLAESITDVLVRTKRDWLVKQRGWDGFVEFFHVEDLEGGIRNVLLAFAGVAGVGAGLAYLIR

SEQ ID NO: 71 - DNA, 4560 bp, Homo sapiens
  CDS (626)..(3022)
gggcccgcagcttccgtggctgagaggagccggcggcggcagtgtctgtggtggccgcggcggcgagagcgacggtcccatctttcccaccctcttggttgccgctggccacacgccctccgctggcggcgacttctcagctccgtgcgcccgggctggacagtgagcctcgagaggagacgcgggcggctagagccggagtggggcgagccgcggaacccggccgggagccgcgcgaggcgtgatcggagggtatggttggcatggaattgaatttcatctgtctgtgggaattgtaagcaagattgccatcacgaaagccaaagtggatttctccagtgtggtgtgcctgcccccttccgtcattgctgtgaatgggctggacggaggaggggccggcgaaaatgatgatgaaccagtgctcgtgtccttatctgcggcacccagtccccagagtgaagctgttgccaatgaactgcaggagctctccttgcagcccgagctgaccctaggcctccaccctggcaggaatcccaatttgcctccacttagtgagcggaagaatgtgctacagttgaaactccagcagcgccggacccgggaagaactggtgagccaagggatcatgccgcctttgaaaagtccagccgcatttcatgagcagagaaggagcttggagcgggccaggacagaggactatctcaaacggaagattcgttcccggccggagagatcggagctggtcaggatgcacattttggaagagacctcggctgagccatccctccaggccaagcagctgaagctgaagagagccagactagccgatgacctcaatgagaagattgcacagaggcctggccccatggagctggtggagaagaacatccttcctgttgagtccagcctgaaggaagccatcattgtgggccaggtgaactatcccaaagtagcagacagctcttccttcgatgaggacagcagcgatgccttatcccccgagcagcctgccagccatgagtcccagggttctgtgccgtcacccctggaggcccgagtcagcgaaccactgctcagtgccacctctgcatcccccacccaggttgtgtctcaacttccgatgggccgggattccagagaaatgcttttcctggcagagcagcctcctctgcctcccccacctctgctgcctcccagcctcaccaatggaaccactatccccactgccaagtccacccccacactcattaagcaaagccaacccaagtctgccagtgagaagtcacagcgcagcaagaaggccaaggagctgaagccaaaggtgaagaagctcaagtaccaccagtacatccccccggaccagaagcaggacaggggggcaccccccatggactcatcctacgccaagatcctgcagcagcagcagctcttcctccagctgcagatcctcaaccagcagcagcagcagcaccacaactaccaggccatcctgcctgccccgccaaagtcagcaggcgaggccctgggaagcagcgggacccccccagtacgcagcctctccactaccaatagcagctccagctcgggcgcccctgggccctgtgggctggcacgtcagaacagcacctcactgactggcaagccgggagccctgccggccaacctggacgacatgaaggtggcagagctgaagcaggagctgaagttgcgatcactgcctgtctcgggcaccaaaactgagctgattgagcgccttcgagcctatcaagaccaaatcagccctgtgccaggagcccccaaggcccctgccgccacctctatcctgcacaaggctggcgaggtggtggtagccttcccagcggcccggctgagcacggggccagccctggtggcagcaggcctggctccagctgaggtggtggtggccacggtggccagcagtggggtggtgaagtttggcagcacgggctccacgccccccgtgtctcccaccccctcggagcgctcactgctcagcacgggcgatgaaaactccacccccggggacacctttggtgagatggtgacatcacctctgacgcagctgaccctgcaggcctcgccactgcagatcctcgtgaaggaggagggcccccgggccgggtcctgttgcctgagccctggggggcgggcggagctagaggggcgcgacaaggaccagatgctgcaggagaaagacaagcagatcgaggcgctgacgcgcatgctccggcagaagcagcagctggtggagcggctcaagctgcagctggagcaggagaagcgagcccagcagcccgcccccgcccccgcccccctcggcacccccgtgaagcaggagaacagcttctccagctgccagctgagccagcagcccctgggccccgctcacccattcaaccccagcctggcggccccagccaccaaccacatagacccttgtgctgtggccccggggcccccgtccgtggtggtgaagcaggaagccttgcagcctgagcccgagccggtccccgccccccagttgcttctggggcctcagggccccagcctcatcaagggggttgcacctcccaccctcatcaccgactccacagggacccaccttgtcctcaccgtgaccaataagaatgcagacagccctggcctgtccagtgggagcccccagcagccctcgtcccagcctggctctccagcgcctgccccctctgcccagatggacctggagcacccactgcagcccctctttgggacccccacttctctgctgaagaaggaaccacctggctatgaggaagccatgagccagcagcccaaacagcaggaaaatggttcctcaagccagcagatggacgacctgtttgacattctcattcagagcggaggtaaccccagaaatttcagcagatttcaaggagccgccatccctgccagggaaggagaagccatccccgaagacagtctgtgggtcccccctggcagcacagccatcaccttctgctgagctcccccaggctgccccacctcctccaggctcaccctccctccctggacgcctggaggacttcctggagagcagcacggggctgcccctgctgaccagtgggcatgacgggccagagcccctttccctcattgacgacctccatagccagatgctgagcagcactgccatcctggaccaccccccgtcacccatggacacctcggaattgcactttgttcctgagcccagcagcaccatgggcctggacctggctgatggccacctggacagcatggactggctggagctgtcgtcaggtggtcccgtgctgagcctagcccccctcagcaccacagcccccagcctcttctccacagacttcctcgatggccatgatttgcagctgcactgggattcctgcttgtagctctctggctcaagacggggtggggaaggggctgggagccagggtactccaatgcgtggctctcctgcgtgattcggcctctccacatggttgtgagtcttgacaatcacagcccctgctttttcccttccctgggaggctagaacagagaagcccttactcctggttcagtgccacgcagggcagaggagagcagctgtcaagaagcagccctggctctcacgctggggttttggacacacggtcagggtcagggccatttcagcttgacctccttttttgaggtcagggggcactgtctgtctggctacaatttggctaaggtaggtgaagcctggccaggcgggaggcttctcttctgacccagggctgagacaggttaaggggtgaatctccttcctttctctccctgctttgctgtgaagggagaaattagcctgggcctctaccccctattccctgtgtctgccaaccccaggatcccagggctccctgccattttagtgtcttggtgtagtgtaaccatttagtggttggtggcaacaattttatgtacaggtgtatatacctctatattatatatcgacatacatatatatttttgggggggggcggacaggagatgggtgcaactccctcccatcctactctcacagaagggcctggatgcaaggttacccttgagctgtgtgccacagtctggtgcccagtctggcatgcagctacccaggcccacccatcacgtgtgattgacatgtaggtaccctgccacggcctatgccccacctgccctgcttcctggctccttatcagtgccatgagggcagaggtgctacctggccttcctgccaggagctctccacccactcacattccgtccccgccgcctcactgcagccagcgtggccctaggacaggaggagcttcgggcccagcttcaccctgcggtggggctgaggggtggccatctcctgccctggggccactggcttcacattctgggctgactcataggggagtaggggtggagtcaccaaaaccagtgctgggacaaagatggggaaggtgtgtgaactttttaaaataaacacaaaaacacaggcctgttaaaaaaaaaaaaaaaaaaaaa

SEQ ID NO: 72 - protein, 798 aa, Homo sapiens
MPPLKSPAAFHEQRRSLERARTEDYLKRKIRSRPERSELVRMHILEETSAEPSLQAKQLKLKRARLADDLNEKIAQRPGPMELVEKNILPVESSLKEAIIVGQVNYPKVADSSSFDEDSSDALSPEQPASHESQGSVPSPLEARVSEPLLSATSASPTQVVSQLPMGRDSREMLFLAEQPPLPPPPLLPPSLTNGTTIPTAKSTPTLIKQSQPKSASEKSQRSKKAKELKPKVKKLKYHQYIPPDQKQDRGAPPMDSSYAKILQQQQLFLQLQILNQQQQQHHNYQAILPAPPKSAGEALGSSGTPPVRSLSTTNSSSSSGAPGPCGLARQNSTSLTGKPGALPANLDDMKVAELKQELKLRSLPVSGTKTELIERLRAYQDQISPVPGAPKAPAATSILHKAGEVVVAFPAARLSTGPALVAAGLAPAEVVVATVASSGVVKFGSTGSTPPVSPTPSERSLLSTGDENSTPGDTFGEMVTSPLTQLTLQASPLQILVKEEGPRAGSCCLSPGGRAELEGRDKDQMLQEKDKQIEALTRMLRQKQQLVERLKLQLEQEKRAQQPAPAPAPLGTPVKQENSFSSCQLSQQPLGPAHPFNPSLAAPATNHIDPCAVAPGPPSVVVKQEALQPEPEPVPAPQLLLGPQGPSLIKGVAPPTLITDSTGTHLVLTVTNKNADSPGLSSGSPQQPSSQPGSPAPAPSAQMDLEHPLQPLFGTPTSLLKKEPPGYEEAMSQQPKQQENGSSSQQMDDLFDILIQSGGNPRNFSRFQGAAIPAREGEAIPEDSLWVPPGSTAITFC

SEQ ID NO: 73 - DNA, 3215 bp, Homo sapiens
  CDS (178)..(2415)
gacaatatcaggtgagctgtggaggtggggtccttggaagctggatgacagcagctggcaaggggataagagagcagtgagcccctccctcaaggaggtctggctttatccatagacagggccctctgaggtggggctgaggtacaaagggggattgagcagcccaggagaagagagatgggggttcccttcttctcttctctcagatgcatggtggacttaggaccttgctgggctgggggtctcactgcagagatgaagctgcttctggccctagcagggctcctggccattctggccacgccccagccctctgaaggtgctgctccagctgtcctgggggaggtggacacctcgttggtgctgagctccatggaggaggccaagcagctggtggacaaggcctacaaggagcggcgggaaagcatcaagcagcggcttcgcagcggctcagccagccccatggaactcctatcctacttcaagcagccggtggcagccaccaggacggcggtgagggccgctgactacctgcacgtggctctagacctgctggagaggaagctgcggtccctgtggcgaaggccattcaatgtcactgatgtgctgacgcccgcccagctgaatgtgttgtccaagtcaagcggctgcgcctaccaggacgtgggggtgacttgcccggagcaggacaaataccgcaccatcaccgggatgtgcaacaacagacgcagccccacgctgggggcctccaaccgtgcctttgtgcgctggctgccggcggagtatgaggacggcttctctcttccctacggctggacgcccggggtcaagcgcaacggcttcccggtggctctggctcgcgcggtctccaacgagatcgtgcgcttccccactgatcagctgactccggaccaggagcgctcactcatgttcatgcaatggggccagctgttggaccacgacctcgacttcacccctgagccggccgcccgggcctccttcgtcactggcgtcaactgcgagaccagctgcgttcagcagccgccctgcttcccgctcaagatcccgcccaatgacccccgcatcaagaaccaagccgactgcatcccgttcttccgctcctgcccggcttgccccgggagcaacatcaccatccgcaaccagatcaacgcgctcacttccttcgtggacgccagcatggtgtacggcagcgaggagcccctggccaggaacctgcgcaacatgtccaaccagctggggctgctggccgtcaaccagcgcttccaagacaacggccgggccctgctgccctttgacaacctgcacgatgacccctgtctcctcaccaaccgctcagcgcgcatcccctgcttcctggcaggggacacccgttccagtgagatgcccgagctcacctccatgcacaccctcttacttcgggagcacaaccggctggccacagagctcaagagcctgaaccctaggtgggatggggagaggctctaccaggaagcccggaagatcgtgggggccatggtccagatcatcacttaccgggactacctgcccctggtgctggggccaacggccatgaggaagtacctgcccacgtaccgttcctacaatgactcagtggacccacgcatcgccaacgtcttcaccaatgccttccgctacggccacaccctcatccaacccttcatgttccgcctggacaatcggtaccagcccatggaacccaacccccgtgtccccctcagcagggtcttttttgcctcctggagggtcgtgctggaaggtggcattgaccccatcctccggggcctcatggccacccctgccaagctgaatcgtcagaaccaaattgcagtggatgagatccgggagcgattgtttgagcaggtcatgaggattgggctggacctgcctgctctgaacatgcagcgcagcagggaccacggcctcccaggatacaatgcctggaggcgcttctgtgggctcccgcagcctgaaactgtgggccagctgggcacggtgctgaggaacctgaaattggcgaggaaactgatggagcagtatggcacgcccaacaacatcgacatctggatgggcggcgtgtccgagcctctgaagcgcaaaggccgcgtgggcccactcctcgcctgcatcatcggtacccagttcaggaagctccgggatggtgatcggttttggtgggagaacgagggtgtgttcagcatgcagcagcgacaggccctggcccagatctcattgccccggatcatctgcgacaacacaggcatcaccaccgtgtctaagaacaacatcttcatgtccaactcatatccccgggactttgtcaactgcagtacacttcctgcattgaacctggcttcctggagggaagcctcctagaggccaggtaagggggtgcagcagtgaggggtatatctgggctggccagttggaaccacggagatctccttgccctagatgagcccagccctgttctgggtgcagctgagaaaatgagtgactagacgttcatttgtgtgctcatgtatgtgcgaagtatataaattggcttttcatgcgtgtgtgttgtctgaacatggggagtgtttcatgggttatgtgtatgtgccatttatgtgagtgtgtgtttgtgctgatgagaatactgagtatgtggaaggcagcagagcggactggtgaggagcacagctcaggaactagactgcctgggttccaatcctggctctgtggcttgctagctatgtgaccttgagcaaattaccctccttaaacaagagttttcttccttgtaaattacatctgtcatggtttcttggagggcccacttgtatcctctggttcttcatttattgagcacctactacatgcaaggcactgtactaggcgtgagaagcatatagaggcaagaaagagataccaagatgccatctgtgtcctggttagcagagctggaccagtggtgccttggagggataagccagctgcagctgggctgtgtggttgacttatgggcccagccagccaggctcaggccatggctcccctttttcttcctcaccctgatttcttgcttattcactgaagttctcctgaagaggaactgggcctgttgccctttctgtaccatttatttgctcccaatgtttatgataataaaggcaccgctgatggggacctcc

SEQ ID NO: 74 - protein, 745 aa, Homo sapiens
MGVPFFSSLRCMVDLGPCWAGGLTAEMKLLLALAGLLAILATPQPSEGAAPAVLGEVDTSLVLSSMEEAKQLVDKAYKERRESIKQRLRSGSASPMELLSYFKQPVAATRTAVRAADYLHVALDLLERKLRSLWRRPFNVTDVLTPAQLNVLSKSSGCAYQDVGVTCPEQDKYRTITGMCNNRRSPTLGASNRAFVRWLPAEYEDGFSLPYGWTPGVKRNGFPVALARAVSNEIVRFPTDQLTPDQERSLMFMQWGQLLDHDLDFTPEPAARASFVTGVNCETSCVQQPPCFPLKIPPNDPRIKNQADCIPFFRSCPACPGSNITIRNQINALTSFVDASMVYGSEEPLARNLRNMSNQLGLLAVNQRFQDNGRALLPFDNLHDDPCLLTNRSARIPCFLAGDTRSSEMPELTSMHTLLLREHNRLATELKSLNPRWDGERLYQEARKIVGAMVQIITYRDYLPLVLGPTAMRKYLPTYRSYNDSVDPRIANVFTNAFRYGHTLIQPFMFRLDNRYQPMEPNPRVPLSRVFFASWRVVLEGGIDPILRGLMATPAKLNRQNQIAVDEIRERLFEQVMRIGLDLPALNMQRSRDHGLPGYNAWRRFCGLPQPETVGQLGTVLRNLKLARKLMEQYGTPNNIDIWMGGVSEPLKRKGRVGPLLACIIGTQFRKLRDGDRFWWENEGVFSMQQRQALAQISLPRIICDNTGITTVSKNNIFMSNSYPRDFVNCSTLPALNLASWREAS

SEQ ID NO: 75 - DNA, 2535 bp, Homo sapiens
  CDS (141)..(1667)
acccttcccccttctccaaccgccaacggccgcctgcgcctgaggcccggcccacgccccatcccgctcgctccacgctgcggcagccccggcggccccaggtgcgcggcccccgccatcccgccccgccgccctgcgccatggaggagggccctctgccgggcgggctgcccagccccgaggatgcgatggtgacggagctcttaagccccgagggtccgttcgcttcggagaacatcggcctgaaggcccccgtgaagtacgaggaggacgagttccacgtcttcaaagaagcgtacctgggcccggcggaccccaaggaacccgtcctgcacgcgttcaaccccgcgctgggcgccgactgcaagggccaggtcaaggcgaagctcgcggggggcgacagcgacggcggggagctcctcggggagtaccccgggatcccagagctcagcgcgctggaggacgtcgcgctcctgcaggccccgcagccgcccgcctgcaacgtgcacttcctgtcctcgctgctacccgcgcaccgcagcccggcggtgttgcccctgggcgcctgggtcctggaaggagcctcccacccgggcgtccgcatgatcccagttgaaatcaaggaagcaggtggtactactacaagtaataatccggaagaagcaactttgcagaatcttcttgctcaggaatcctgttgcaagttcccatcgtcccaggaactagaggatgcctcctgctgttctcttaagaaagattccaacccaatggtgatatgccaattgaaagggggcacacaaatgctatgtatagacaattctagaacaagagaactaaaagcactccatttggttcctcagtatcaagatcaaaataattatctacagtcagatgtccctaaaccaatgactgctttagtagggagatttttgccagcatcaacaaaattaaatctcattacacaacaacttgagggagccttaccatcggtagtcaacgggtctgctttcccctcgggatcaactcttccaggaccaccaaaaataactttggctgggtactgtgactgctttgccagtggggacttttgcaacaactgcaattgtaataattgttgcaacaacttgcatcatgatattgaacggtttaaagccattaaggcatgtcttggtagaaatccagaagctttccagccaaaaattgggaagggccaattgggcaatgtcaagccccagcacaacaaagggtgcaactgcaggaggtcaggctgcctgaagaattactgcgagtgctatgaggcccaaattatgtgttcttctatttgcaaatgcattggttgcaaaaattatgaagaaagcccagaacgaaagacactaatgagcatgccaaactacatgcagactggaggtttggaaggcagccattacctgccaccaacgaaattttcaggacttccaagattcagtcacgataggcggccttcctcatgcatctcctgggaggtggtggaggccacatgcgcctgcctgcttgctcagggagaagaggccgagaaagaacactgctccaagtgcctggcagagcagatgatcctggaggaatttggaaggtgcttatcacagattctccacactgagtttaaatctaagggattgaaaatggagtagagtataaagtgtgaatgcatgttgattttgtcttagtctagaaatctctagtttagaaaggatgtttaggggaacatgaggctggctctgcagcaacaaccaggctcccctgcatccctgggcccagggagtttactcagagctctctgaagatgtggcaacccatgcccccttttctgaggaggtgcatggcctgagcattgtttgtctggcccagaggagagagcttgggttcccatagtcctgggagagtgtctgcagggcggcggagggcagagcagggcaggggagggcacagcaggccctgcgaagggcagagcggggcaggggagggcagagcaggccctgcggagagctcactctggtcgactcttcctctcagagaatgttgctctggaggctgctctgcatgaaaaccctaatggtttcttgtttgtttttcaaattatttagaaataagttctccggatgggctgttgtgataccacttaaaatctctagagaactactgaacacctaaagattttctgtagcgtagatatttccccagaggcacgcgaactgtcagtctttcctaaggcccccgggagacgcaggcaatggggcctcgcaggccaggcttgcaccagcatgtcttgagttagaggacttaaaattatccagtttcttctgtgtttctacttgaattgtggaaaagctctattatccaattaacttctccataattattgttgtaatattattattgtttgtaaaacatggttcacataactagcttgtggaaaccagcaggtaaaatgaattcttaagttgacgcttttggttctgttgtaaagcaaagatgaataaaaatttccaatgtcttcaa

SEQ ID NO: 76 - protein, 508 aa, Homo sapiens
MEEGPLPGGLPSPEDAMVTELLSPEGPFASENIGLKAPVKYEEDEFHVFKEAYLGPADPKEPVLHAFNPALGADCKGQVKAKLAGGDSDGGELLGEYPGIPELSALEDVALLQAPQPPACNVHFLSSLLPAHRSPAVLPLGAWVLEGASHPGVRMIPVEIKEAGGTTTSNNPEEATLQNLLAQESCCKFPSSQELEDASCCSLKKDSNPMVICQLKGGTQMLCIDNSRTRELKALHLVPQYQDQNNYLQSDVPKPMTALVGRFLPASTKLNLITQQLEGALPSVVNGSAFPSGSTLPGPPKITLAGYCDCFASGDFCNNCNCNNCCNNLHHDIERFKAIKACLGRNPEAFQPKIGKGQLGNVKPQHNKGCNCRRSGCLKNYCECYEAQIMCSSICKCIGCKNYEESPERKTLMSMPNYMQTGGLEGSHYLPPTKFSGLPRFSHDRRPSSCISWEVVEATCACLLAQGEEAEKEHCSKCLAEQMILEEFGRCLSQILHTEFKSKGLKME

SEQ ID NO: 77 - DNA, 2785 bp, Homo sapiens
  CDS (266)..(2368)
actcaggcccctcccccggcgcccgcgcgccaggactgggcggcgccgacgcgcttggcgggagatagaaaagtgcttcaacccgcgccggcggcgactgcagttcctgcgagcgaggagcgcgggacctgctgacacgctgacgccttcgagcgcggcccggggcccggagcggccggagcagcccgggtcctgaccccggcccggctcccgctccgggctctgccggcgggcgggcgagcgcggcgcggtccgggccggggggatgtctcggcggacgcgctgcgaggatctggatgagctgcactaccaggacacagattcagatgtgccggagcagagggatagcaagtgcaaggtcaaatggacccatgaggaggacgagcagctgagggccctggtgaggcagtttggacagcaggactggaagttcctggccagccacttccctaaccgcactgaccagcaatgccagtacaggtggctgagagttttgaatccagaccttgtcaaggggccatggaccaaagaggaagaccaaaaagtcatcgagctggttaagaagtatggcacaaagcagtggacactgattgccaagcacctgaagggccggctggggaagcagtgccgtgaacgctggcacaaccacctcaaccctgaggtgaagaagtcttgctggaccgaggaggaggaccgcatcatctgcgaggcccacaaggtgctgggcaaccgctgggccgagatcgccaagatgttgccagggaggacagacaatgctgtgaagaatcactggaactctaccatcaaaaggaaggtggacacaggaggcttcttgagcgagtccaaagactgcaagcccccagtgtacttgctgctggagctcgaggacaaggacggcctccagagtgcccagcccacggaaggccagggaagtcttctgaccaactggccctccgtccctcctaccataaaggaggaggaaaacagtgaggaggaacttgcagcagccaccacatcgaaggaacaggagcccatcggtacagatctggacgcagtgcgaacaccagagcccttggaggaattcccgaagcgtgaggaccaggaaggctccccaccagaaacgagcctgccttacaagtgggtggtggaggcagctaacctcctcatccctgctgtgggttctagcctctctgaagccctggacttgatcgagtcggaccctgatgcttggtgtgacctgagtaaatttgacctccctgaggaaccatctgcagaggacagtatcaacaacagcctagtgcagctgcaagcgtcacatcagcagcaagtcctgccaccccgccagccttccgccctggtgcccagtgtgaccgagtaccgcctggatggccacaccatctcagacctgagccggagcagccggggcgagctgatccccatctcccccagcactgaagtcgggggctctggcattggcacaccgccctctgtgctcaagcggcagaggaagaggcgtgtggctctgtcccctgtcactgagaatagcaccagtctgtccttcctggattcctgtaacagcctcacgcccaagagcacacctgttaagaccctgcccttctcgccctcccagtttctgaacttctggaacaaacaggacacattggagctggagagcccctcgctgacatccaccccagtgtgcagccagaaggtggtggtcaccacaccactgcaccgggacaagacacccctgcaccagaaacatgctgcgtttgtaaccccagatcagaagtactccatggacaacactccccacacgccaaccccgttcaagaacgccctggagaagtacggacccctgaagcccctgccacagaccccgcacctggaggaggacttgaaggaggtgctgcgttctgaggctggcatcgaactcatcatcgaggacgacatcaggcccgagaagcagaagaggaagcctgggctgcggcggagccccatcaagaaagtccggaagtctctggctcttgacattgtggatgaggatgtgaagctgatgatgtccacactgcccaagtctctatccttgccgacaactgccccttcaaactcttccagcctcaccctgtcaggtatcaaagaagacaacagcttgctcaaccagggcttcttgcaggccaagcccgagaaggcagcagtggcccagaagccccgaagccacttcacgacacctgcccctatgtccagtgcctggaagacggtggcctgcggggggaccagggaccagcttttcatgcaggagaaagcccggcagctcctgggccgcctgaagcccagccacacatctcggaccctcatcttgtcctgaggtgttgagggtgtcacgagcccattctcatgtttacaggggttgtgggggcagagggggtctgtgaatctgagagtcattcaggtgacctcctgcagggagccttctgccaccagcccctccccagactctcaggtggaggcaacagggccatgtgctgccctgttgccgagcccagctgtgggcggctcctggtgctaacaacaaagttccacttccaggtctgcctggttccctccccaaggccacagggagctccgtcagcttctcccaagcccacgtcaggcctggcctcatctcagaccctgcttaggatgggggatgtggccaggggtgctcctgtgctcaccctctcttggtgcatttttttggaagaataaaattgcctctctctttgtgctggtctggaaaaaaaaa

SEQ ID NO: 78 - protein, 700 aa, Homo sapiens
MSRRTRCEDLDELHYQDTDSDVPEQRDSKCKVKWTHEEDEQLRALVRQFGQQDWKFLASHFPNRTDQQCQYRWLRVLNPDLVKGPWTKEEDQKVIELVKKYGTKQWTLIAKHLKGRLGKQCRERWHNHLNPEVKKSCWTEEEDRIICEAHKVLGNRWAEIAKMLPGRTDNAVKNHWNSTIKRKVDTGGFLSESKDCKPPVYLLLELEDKDGLQSAQPTEGQGSLLTNWPSVPPTIKEEENSEEELAAATTSKEQEPIGTDLDAVRTPEPLEEFPKREDQEGSPPETSLPYKWVVEAANLLIPAVGSSLSEALDLIESDPDAWCDLSKFDLPEEPSAEDSINNSLVQLQASHQQQVLPPRQPSALVPSVTEYRLDGHTISDLSRSSRGELIPISPSTEVGGSGIGTPPSVLKRQRKRRVALSPVTENSTSLSFLDSCNSLTPKSTPVKTLPFSPSQFLNFWNKQDTLELESPSLTSTPVCSQKVVVTTPLHRDKTPLHQKHAAFVTPDQKYSMDNTPHTPTPFKNALEKYGPLKPLPQTPHLEEDLKEVLRSEAGIELIIEDDIRPEKQKRKPGLRRSPIKKVRKSLALDIVDEDVKLMMSTLPKSLSLPTTAPSNSSSLTLSGIKEDNSLLNQGFLQAKPEKAAVAQKPRSHFTTPAPMSSAWKTVACGGTRDQLFMQEKARQLLGRLKPSHTSRTLILS

SEQ ID NO: 79 - DNA, 7591 bp, Homo sapiens
  CDS (159)..(6323)
tccatccctgaccgggccgaggctgctggatgccgcgtctccgcttctgctgcctgccgggcgggctccggtggccgcagcaaagtggggcaccaaggccctgtgctaagcactcataatcctctgggggtgctacccctacaaacagcacccccaccatgtttaacctaatgaagaaagacaaggacaaagatggcgggcggaaggagaagaaggagaaaaaggagaaaaaggagcggatgtcagcggcagagcttcggagcctggaggagatgagcctgcgacgtggcttcttcaacctgaaccgctcctccaagcgtgaatccaagacgcgcctggaaatctccaaccccatccccatcaaggtggccagcggctctgacctgcacctgactgacattgactccgatagtaaccggggcagcgtcatcctggactcgggccacctaagtacagccagctccagcgatgacctcaagggtgaggagggtagcttccgtggctcggtgctgcagcgggcagccaagttcggctcactggccaagcagaactcacagatgattgtcaagcgcttttccttctcccagcgtagccgggatgagagcgcctcagaaacctcgacgccctcagagcactctgccgccccctcgccacaggtggaggtgaggactctagagggacagctggtgcagcatcctggcccaggcatccctcgaccagggcaccgatcccgagcccctgagctagtgactaaaaagttcccagtcgacctgcgcctgccccccgtggtgcccctgcccccacctaccctccgggagctggagctgcaacgacggcccactggagactttggcttctccctgcggcgcacaaccatgctggatcggggccccgagggccaggcctgtcggcgtgtggtccactttgctgagcctggtgcaggcaccaaggacctggccctggggctggtgccaggagatcgactggtggagattaatgggcacaatgtggagagcaagtccagggatgagattgtggagatgatccggcagtcaggggacagcgtgcggctcaaggtgcagcccattccagagctcagcgagctcagcaggagctggctgcggagcggcgagggacctcgcagggagccatccgatgcgaaaacagaagaacagattgcagcagaagaggcctggaatgagacggagaaggtgtggctggtccatagggacggcttctcactggccagtcaactcaaatctgaggagctcaacttgcctgaggggaaggtgcgtgtgaagctggaccacgatggggccatcctggatgtggatgaggatgacgttgagaaggctaatgctccctcctgcgaccgtctggaggatctggcctcactggtgtacctcaatgagtccagcgtcctgcacaccttgcgccagcgctatggcgctagcctgctgcacacgtatgctggccccagcctgctggttcttggcccccgtggggcccctgctgtgtactctgagaaggtgatgcacatgttcaagggttgtcggcgggaggacatggcaccccacatctatgcagtggcccagaccgcatacagggcgatgctgatgagccgtcaggatcagtcaatcatcctcctgggcagtagtggcagtggcaagaccaccagctgccagcatctggtgcagtacctggccaccatcgcgggcatcagcgggaacaaggtgttttctgtggagaagtggcaggctctgtacaccctcctggaagcctttgggaacagccccaccatcattaatggcaatgccacccgcttctcccagatcctctccctggactttgaccaagctggccaggtggcctcagcctccattcagacaatgcttctggagaagctgcgtgtggctcggcgcccagccagtgaagccacattcaacgtcttctactacctgctggcctgtggggatggcaccctcaggacagagctccacctcaaccacttggcagagaacaatgtgtttgggattgtgccactggccaagcctgaggaaaagcagaaggcagctcagcagtttagtaagctgcaggcggccatgaaggtgctgggcatctcccccgatgaacagaaggcctgctggttcattctggctgccatctaccacctgggggctgcgggagccaccaaagaagctgctgaagctgggcgcaagcagtttgcccgccatgagtgggcccagaaggctgcgtacctactgggctgcagcctggaggagctgtcctcagccatcttcaagcaccagcacaagggtggcaccctgcagcgctccacctccttccgccagggccccgaggagagtggcctgggagatgggacaggcccgaaactgagtgcactggagtgccttgagggcatggcggccggcctctacagcgagctcttcacccttctcgtctccctggtgaatagggctctcaagtccagccagcactcactctgctccatgatgattgtcgacaccccgggcttccagaaccctgagcagggtgggtcagcccgcggagcctcctttgaggagctgtgccacaactacacccaagaccggctgcagaggctcttccacgagcgcaccttcgtgcaggagttggaaagatacaaggaggagaacatcgagctggcgtttgacgacttggaacccccgacggatgactctgtggctgctgtggaccaggcctcccatcagtccctggtccgctcgctggcccgcacagacgaggcgaggggcctgctctggctattggaagaggaggctctggtgccaggggccagtgaggacaccctcctggagcgccttttctcctattatggcccccaggaaggtgacaaaaaaggccaaagcccccttctgcacagcagcaaaccacaccactttctcctgggccacagccatggcaccaactgggtagagtacaatgtgactggctggctgaactacaccaagcagaacccagccacccagaatgccccccggctcctgcaggactcccagaaaaaaatcatcagcaacctgtttctgggccgcgcaggcagtgccacggtgctctctggctccatcgcgggcctggagggcggctcgcagctggcactgcgccgggccaccagcatgcggaaaacctttaccacaggcatggcggctgtcaaaaagaagtcactgtgcatccagatgaagctacaggtggacgccctcatcgacaccatcaagaagtcaaagctgcattttgtgcactgcttcctgcctgtagctgagggctgggctggggagccccgttccgcctcctcccgccgagtcagcagcagcagtgagctggacctgccctcgggagaccactgcgaggctgggctcctgcagctcgacgtgcccctgctccgcacccagctccgcggctcccgcctgctcgatgccatgcgcatgtaccgccaaggttaccctgaccacatggtgttttccgagttccgccgccgctttgatgtcctggccccgcacctgaccaagaaacacgggcgtaactacatcgtggtggatgaaaggcgggcagtggaggagctgctggagtgcttggatctggagaagagcagctgctgcatgggcctgagccgggtgttcttccgggcgggcaccttggcacggctggaggagcagcgggatgaacaaaccagcaggaacctaaccctgttccaagcagcctgcaggggctacctggcccgccagcacttcaagaagagaaagatccaggacctggccattcgctgtgtacagaagaacatcaagaagaacaaaggggtgaaggactggccctggtggaagctttttaccacagtgaggcccctcatcgaagtacagctgtcagaggagcagatccggaacaaagacgaggagatccagcagctgcggagcaagctcgagaaggcggagaaggagaggaacgagctgcggctcaacagtgaccggctggagagccggatctcagagctgacatcggagctgacagatgagcgtaacacaggagagtccgcctcccagctgctggacgcggagacagcagagaggctccgggctgagaaggagatgaaggaactgcagacccagtacgatgcactgaagaagcagatggaggttatggaaatggaggtgatggaggcccgtctcatccgggcagcggagatcaacggggaagtggatgatgatgatgcaggtggcgagtggcggctgaagtatgagcgggctgtgcgggaggtggacttcaccaagaaacggctccagcaggagtttgaggacaagctggaggtggagcagcagaacaagaggcagctggaacggcggctcggggacctgcaggcagatagtgaggagagtcagcgggctctgcagcagctcaagaagaagtgccagcgactgacggctgagctgcaagacaccaagctgcacctggagggccagcaggtccgcaaccacgaactggagaagaagcagaggaggtttgacagtgagctctcgcaggcgcatgaggaggcccagcgggagaagctgcagcgggagaagctgcagcgggagaaggacatgctcctcgctgaggctttcagcctgaagcagcaactagaggaaaaagacatggacattgcagggttcacccagaaggttgtgtctctagaggcagagctccaggacatttcttcccaagagtccaaggatgaggcttctctggccaaggtcaagaaacagctccgggacctggaggccaaagtcaaggatcaggaagaagagctggatgagcaggcagggaccatccagatgctggaacaggccaagctgcgtctggagatggagatggagcggatgagacagacccattctaaggagatggagagtcgggatgaggaggtggaggaggcccggcagtcgtgtcagaagaagttaaaacagatggaggtgcagctagaggaagagtatgaggacaagcagaaggttctgcgagagaagcgggagctggagggcaagctcgccaccctcagcgaccaggtgaaccggcgggactttgagtcagagaagcggctgcggaaggacctgaagcgcaccaaggccctgctggcagatgcccagctcatgctggaccacctgaagaacagtgctcccagcaagcgagagattgcccagctcaagaaccagctggaggagtcagagttcacctgtgcggcagccgtgaaagcacggaaagcaatggaggtggagatcgaagacctgcacctgcagattgatgacatcgccaaagccaagacagcgctggaggagcagctgagccgccttcagcgtgagaagaatgagatccagaaccggctggaggaagatcaggaagacatgaacgaattgatgaagaagcacaaggctgccgtggctcaggcttcccgggacctggctcagataaatgatctccaagctcagctagaagaagccaacaaagagaagcaggagctgcaggagaagctacaagccctccagagccaggtggagttcctggagcagtccatggtggacaagtccctggtgagcaggcaggaagctaagatacgggagctggagacacgcctggagtttgaaaggacgcaagtgaaacggctggagagcctggctagccgtctcaaggaaaacatggagaagctgactgaggagcgggatcagcgcattgcagccgagaaccgggagaaggaacagaacaagcggctacagaggcagctccgggacaccaaggaggagatgggcgagcttgccaggaaggaggccgaggcgagccgcaagaagcacgaactggagatggatctagaaagcctggaggctgctaaccagagcctgcaggctgacctaaagttggcattcaagcgcatcggggacctgcaggctgccattgaggatgagatggagagtgatgagaatgaggacctcatcaacagtttgcaggacatggtgacaaagtatcagaaaagaaagaataaacttgagggagactctgatgtggactcggagctggaggaccgtgttgacggggtcaagtcctggttgtcaaaaaacaagggaccttccaaggcagcttctgatgatggcagcttaaagagttccagccccaccagctactggaagtcccttgcccctgatcggtcagatgatgagcacgaccctctcgacaacacctccagaccgcgatactcccacagttatctgagtgacagcgacacagaggccaagctgacggagactaacgcatagcccaggggagtggttggcagccctctcaccccagggcctgtggctgcctgggcacctctcccaggaagtggtggggcaccggtctcccccacccgactgctgatctgcatgggaaacaccctgaccttcttctgtcaggggcactttccaggctatgggtgtctgatgtctccacgtggaagaggtgggggaaagaggagtttctgaagagaactttttgctcctctgtctcaaaatgccagactcttggcttctaccctgtgtcaccgtgggcagtggcaggtggcctggcactgcatggagccagcacgttgacctccctctcagctccctgctcagggacggtggacaggttgcctactgggacactctaggttgctgggtccatggggaggattgggggaggagaagcagtgccttccctctcgtgtggggtgggggctctctcttcttggtgcctgctgtctttctactttttaatttaaatacccaacctctccatcacagctgcatccctgagagtgggagggggctgtagtggtagctggggctcccaagaacgactcgggaatgtcatctccatcttcacccttcagagagcagtcctttctctgtgcagctggagacgctggtgaggagagccgggtccaggttcttaagaatgaggtgcggaggggctctccggtgctgctgggctgggttgagcaagcctacgcagacaagtgtgtgtgtggaccatccgcacctccagcccccaccccaccctctttgtctcagcgtgttatgtgcaatgacctatttaaggtaaacccattccaactacagcagttcagggctgatccaagcactgcctccctcctgctctgtccaggtggtctggaccataaactcaacttgagagggaaggcttggggttgaggacttgtgatcagaaaaactgaagatggaagttttggccggtgctcattagacatgagtcctcactctgtgtcctgagcccgtgtcattcttccaacctccctgcccccacacacttatcccagacacaacaccatgtggtctggaggtcccagcccccaccctaaaaaggttatccctgagaactccaccagacttgggagcccaagtgcagtgcctggtgctgctcccatctgccgccccccttctctcctgcaattggtttgtactcactgggctgtgctctcccctgtttacccgatgtatggaaataaaggcccttttcctcctggctgcgccagtaaaaaaaa

SEQ ID NO: 80 - protein, 2054 aa, Homo sapiens
MFNLMKKDKDKDGGRKEKKEKKEKKERMSAAELRSLEEMSLRRGFFNLNRSSKRESKTRLEISNPIPIKVASGSDLHLTDIDSDSNRGSVILDSGHLSTASSSDDLKGEEGSFRGSVLQRAAKFGSLAKQNSQMIVKRFSFSQRSRDESASETSTPSEHSAAPSPQVEVRTLEGQLVQHPGPGIPRPGHRSRAPELVTKKFPVDLRLPPVVPLPPPTLRELELQRRPTGDFGFSLRRTTMLDRGPEGQACRRVVHFAEPGAGTKDLALGLVPGDRLVEINGHNVESKSRDEIVEMIRQSGDSVRLKVQPIPELSELSRSWLRSGEGPRREPSDAKTEEQIAAEEAWNETEKVWLVHRDGFSLASQLKSEELNLPEGKVRVKLDHDGAILDVDEDDVEKANAPSCDRLEDLASLVYLNESSVLHTLRQRYGASLLHTYAGPSLLVLGPRGAPAVYSEKVMHMFKGCRREDMAPHIYAVAQTAYRAMLMSRQDQSIILLGSSGSGKTTSCQHLVQYLATIAGISGNKVFSVEKWQALYTLLEAFGNSPTIINGNATRFSQILSLDFDQAGQVASASIQTMLLEKLRVARRPASEATFNVFYYLLACGDGTLRTELHLNHLAENNVFGIVPLAKPEEKQKAAQQFSKLQAAMKVLGISPDEQKACWFILAAIYHLGAAGATKEAAEAGRKQFARHEWAQKAAYLLGCSLEELSSAIFKHQHKGGTLQRSTSFRQGPEESGLGDGTGPKLSALECLEGMAAGLYSELFTLLVSLVNRALKSSQHSLCSMMIVDTPGFQNPEQGGSARGASFEELCHNYTQDRLQRLFHERTFVQELERYKEENIELAFDDLEPPTDDSVAAVDQASHQSLVRSLARTDEARGLLWLLEEEALVPGASEDTLLERLFSYYGPQEGDKKGQSPLLHSSKPHHFLLGHSHGTNWVEYNVTGWLNYTKQNPATQNAPRLLQDSQKKIISNLFLGRAGSATVLSGSIAGLEGGSQLALRRATSMRKTFTTGMAAVKKKSLCIQMKLQVDALIDTIKKSKLHFVHCFLPVAEGWAGEPRSASSRRVSSSSELDLPSGDHCEAGLLQLDVPLLRTQLRGSRLLDAMRMYRQGYPDHMVFSEFRRRFDVLAPHLTKKHGRNYIVVDERRAVEELLECLDLEKSSCCMGLSRVFFRAGTLARLEEQRDEQTSRNLTLFQAACRGYLARQHFKKRKIQDLAIRCVQKNIKKNKGVKDWPWWKLFTTVRPLIEVQLSEEQIRNKDEEIQQLRSKLEKAEKERNELRLNSDRLESRISELTSELTDERNTGESASQLLDAETAERLRAEKEMKELQTQYDALKKQMEVMEMEVMEARLIRAAEINGEVDDDDAGGEWRLKYERAVREVDFTKKRLQQEFEDKLEVEQQNKRQLERRLGDLQADSEESQRALQQLKKKCQRLTAELQDTKLHLEGQQVRNHELEKKQRRFDSELSQAHEEAQREKLQREKLQREKDMLLAEAFSLKQQLEEKDMDIAGFTQKVVSLEAELQDISSQESKDEASLAKVKKQLRDLEAKVKDQEEELDEQAGTIQMLEQAKLRLEMEMERMRQTHSKEMESRDEEVEEARQSCQKKLKQMEVQLEEEYEDKQKVLREKRELEGKLATLSDQVNRRDFESEKRLRKDLKRTKALLADAQLMLDHLKNSAPSKREIAQLKNQLEESEFTCAAAVKARKAMEVEIEDLHLQIDDIAKAKTALEEQLSRLQREKNEIQNRLEEDQEDMNELMKKHKAAVAQASRDLAQINDLQAQLEEANKEKQELQEKLQALQSQVEFLEQSMVDKSLVSRQEAKIRELETRLEFERTQVKRLESLASRLKENMEKLTEERDQRIAAENREKEQNKRLQRQLRDTKEEMGELARKEAEASRKKHELEMDLESLEAANQSLQADLKLAFKRIGDLQAAIEDEMESDENEDLINSLQDMVTKYQKRKNKLEGDSDVDSELEDRVDGVKSWLSKNKGPSKAASDDGSLKSSSPTSYWKSLAPDRSDDEHDPLDNTSRPRYSHSYLSDSDTEAKLTETNA

SEQ ID NO: 81 - DNA, 8733 bp, Homo sapiens
  CDS (122)..(7771)
gctcccggcttagaggacagcggggaaggcgggcggtggggcagggggcctgaagcggcggtaccggtgctggcggcggcagctgaggccttggccgaagccgcgcgaacctcagggcaagatgcttggaaccggacctgccgccgccaccaccgctgccaccacatctagcaatgtgagcgtcctgcagcagtttgccagtggcctaaagagccggaatgaggaaaccagggccaaagccgccaaggagctccagcactatgtcaccatggaactccgagagatgagtcaagaggagtctactcgcttctatgaccaactgaaccatcacatttttgaattggtttccagctcagatgccaatgagaggaaaggtggcatcttggccatagctagcctcataggagtggaaggtgggaatgccacccgaattggcagatttgccaactatcttcggaacctcctcccctccaatgacccagttgtcatggaaatggcatccaaggccattggccgtcttgccatggcaggggacacttttaccgctgagtacgtggaatttgaggtgaagcgagccctggaatggctgggtgctgaccgcaatgagggccggagacatgcagctgtcctggttctccgtgagctggccatcagcgtccctaccttcttcttccagcaagtgcaacccttctttgacaacatttttgtggccgtgtgggaccccaaacaggccatccgtgagggagctgtagccgcccttcgtgcctgtctgattctcacaacccagcgtgagccgaaggagatgcagaagcctcagtggtacaggcacacatttgaagaagcagagaagggatttgatgagaccttggccaaagagaagggcatgaatcgggatgatcggatccatggagccttgttgatccttaacgagctggtccgaatcagcagcatggagggagagcgtctgagagaagaaatggaagaaatcacacagcagcagctggtacacgacaagtactgcaaagatctcatgggcttcggaacaaaacctcgtcacattacccccttcaccagtttccaggctgtacagccccagcagtcaaatgccttggtggggctgctggggtacagctctcaccaaggcctcatgggatttgggacctcccccagtccagctaagtccaccctggtggagagccggtgttgcagagacttgatggaggagaaatttgatcaggtgtgccagtgggtgctgaaatgcaggaatagcaagaactcgctgatccaaatgacaatccttaatttgttgccccgcttggctgcattccgaccttctgccttcacagatacccagtatctccaagataccatgaaccatgtcctaagctgtgtcaagaaggagaaggaacgtacagcggccttccaagccctggggctactttctgtggctgtgaggtctgagtttaaggtctatttgcctcgcgtgctggacatcatccgagcggccctgcccccaaaggacttcgcccataagaggcagaaggcaatgcaggtggatgccacagtcttcacttgcatcagcatgctggctcgagcaatggggccaggcatccagcaggatatcaaggagctgctggagcccatgctggcagtgggactaagccctgccctcactgcagtgctctacgacctgagccgtcagattccacagctaaagaaggacattcaagatgggctactgaaaatgctgtccctggtccttatgcacaaaccccttcgccacccaggcatgcccaagggcctggcccatcagctggcctctcctggcctcacgaccctccctgaggccagcgatgtgggcagcatcactcttgccctccgaacgcttggcagctttgaatttgaaggccactctctgacccaatttgttcgccactgtgcggatcatttcctgaacagtgagcacaaggagatccgcatggaggctgcccgcacctgctcccgcctgctcacaccctccatccacctcatcagtggccatgctcatgtggttagccagaccgcagtgcaagtggtggcagatgtgcttagcaaactgctcgtagttgggataacagatcctgaccctgacattcgctactgtgtcttggcgtccctggacgagcgctttgatgcacacctggcccaggcggagaacttgcaggccttgtttgtggctctgaatgaccaggtgtttgagatccgggagctggccatctgcactgtgggccgactcagtagcatgaaccctgcctttgtcatgcctttcctgcgcaagatgctcatccagattttgacagagttggagcacagtgggattggaagaatcaaagagcagagtgcccgcatgctggggcacctggtctccaatgccccccgactcatccgcccctacatggagcctattctgaaggcattaattttgaaactgaaagatccagaccctgatccaaacccaggtgtgatcaataatgtcctggcaacaataggagaattggcacaggttagtggcctggaaatgaggaaatgggttgatgaactttttattatcatcatggacatgctccaggattcctctttgttggccaaaaggcaggtggctctgtggaccctgggacagttggtggccagcactggctatgtagtagagccctacaggaagtaccctactttgcttgaggtgctactgaattttctgaagactgagcagaaccagggtacacgcagagaggccatccgtgtgttagggcttttaggggctttggatccttacaagcacaaagtgaacattggcatgatagaccagtcccgggatgcctctgctgtcagcctgtcagaatccaagtcaagtcaggattcctctgactatagcactagtgaaatgctggtcaacatgggaaacttgcctctggatgagttctacccagctgtgtccatggtggccctgatgcggatcttccgagaccagtcactctctcatcatcacaccatggttgtccaggccatcaccttcatcttcaagtccctgggactcaaatgtgtgcagttcctgccccaggtcatgcccacgttccttaacgtcattcgagtctgtgatggggccatccgggaatttttgttccagcagctgggaatgttggtgtcctttgtgaagagccacatcagaccttatatggatgaaatagtcaccctcatgagagaattctgggtcatgaacacctcaattcagagcacgatcattcttctcattgagcaaattgtggtagctcttgggggtgaatttaagctctacctgccccagctgatcccacacatgctgcgtgtcttcatgcatgacaacagcccaggccgcattgtctctatcaagttactggctgcaatccagctgtttggcgccaacctggatgactacctgcatttactgctgcctcctattgttaagttgtttgatgcccctgaagctccactgccatctcgaaaggcagcgctagagactgtggaccgcctgacggagtccctggatttcactgactatgcctcccggatcattcaccctattgttcgaacactggaccagagcccagaactgcgctccacagccatggacacgctgtcttcacttgtttttcagctggggaagaagtaccaaattttcattccaatggtgaataaagttctggtgcgacaccgaatcaatcatcagcgctatgatgtgctcatctgcagaattgtcaagggatacacacttgctgatgaagaggaggatcctttgatttaccagcatcggatgcttaggagtggccaaggggatgcattggctagtggaccagtggaaacaggacccatgaagaaactgcacgtcagcaccatcaacctccaaaaggcctggggcgctgccaggagggtctccaaagatgactggctggaatggctgagacggctgagcctggagctgctgaaggactcatcatcgccctccctgcgctcctgctgggccctggcacaggcctacaacccgatggccagggatctcttcaatgctgcatttgtgtcctgctggtctgaactgaatgaagatcaacaggatgagctcatcagaagcatcgagttggccctcacctcacaagacatcgctgaagtcacacagaccctcttaaacttggctgaattcatggaacacagtgacaagggccccctgccactgagagatgacaatggcattgttctgctgggtgagagagctgccaagtgccgagcatatgccaaagcactacactacaaagaactggagttccagaaaggccccacccctgccattctagaatctctcatcagcattaataataagctacagcagccggaggcagcggccggagtgttagaatatgccatgaaacactttggagagctggagatccaggctacctggtatgagaaactgcacgagtgggaggatgcccttgtggcctatgacaagaaaatggacaccaacaaggacgacccagagctgatgctgggccgcatgcgctgcctcgaggccttgggggaatggggtcaactccaccagcagtgctgtgaaaagtggaccctggttaatgatgagacccaagccaagatggcccggatggctgctgcagctgcatggggtttaggtcagtgggacagcatggaagaatacacctgtatgatccctcgggacacccatgatggggcattttatagagctgtgctggcactgcatcaggacctcttctccttggcacaacagtgcattgacaaggccagggacctgctggatgctgaattaactgcgatggcaggagagagttacagtcgggcatatggggccatggtttcttgccacatgctgtccgagctggaggaggttatccagtacaaacttgtccccgagcgacgagagatcatccgccagatctggtgggagagactgcagggctgccagcgtatcgtagaggactggcagaaaatccttatggtgcggtcccttgtggtcagccctcatgaagacatgagaacctggctcaagtatgcaagcctgtgcggcaagagtggcaggctggctcttgctcataaaactttagtgttgctcctgggagttgatccgtctcggcaacttgaccatcctctgccaacagttcaccctcaggtgacctatgcctacatgaaaaacatgtggaagagtgcccgcaagatcgatgccttccagcacatgcagcattttgtccagaccatgcagcaacaggcccagcatgccatcgctactgaggaccagcagcataagcaggaactgcacaagctcatggcccgatgcttcctgaaacttggagagtggcagctgaatctacagggcatcaatgagagcacaatccccaaagtgctgcagtactacagcgccgccacagagcacgaccgcagctggtacaaggcctggcatgcgtgggcagtgatgaacttcgaagctgtgctacactacaaacatcagaaccaagcccgcgatgagaagaagaaactgcgtcatgccagcggggccaacatcaccaacgccaccactgccgccaccacggccgccactgccaccaccactgccagcaccgagggcagcaacagtgagagcgaggccgagagcaccgagaacagccccaccccatcgccgctgcagaagaaggtcactgaggatctgtccaaaaccctcctgatgtacacggtgcctgccgtccagggcttcttccgttccatctccttgtcacgaggcaacaacctccaggatacactcagagttctcaccttatggtttgattatggtcactggccagatgtcaatgaggccttagtggagggggtgaaagccatccagattgatacctggctacaggttatacctcagctcattgcaagaattgatacgcccagacccttggtgggacgtctcattcaccagcttctcacagacattggtcggtaccacccccaggccctcatctacccactgacagtggcttctaagtctaccacgacagcccggcacaatgcagccaacaagattctgaagaacatgtgtgagcacagcaacaccctggtccagcaggccatgatggtgagcgaggagctgatccgagtggccatcctctggcatgagatgtggcatgaaggcctggaagaggcatctcgtttgtactttggggaaaggaacgtgaaaggcatgtttgaggtgctggagcccttgcatgctatgatggaacggggcccccagactctgaaggaaacatcctttaatcaggcctatggtcgagatttaatggaggcccaagagtggtgcaggaagtacatgaaatcagggaatgtcaaggacctcacccaagcctgggacctctattatcatgtgttccgacgaatctcaaagcagctgcctcagctcacatccttagagctgcaatatgtttccccaaaacttctgatgtgccgggaccttgaattggctgtgccaggaacatatgaccccaaccagccaatcattcgcattcagtccatagcaccgtctttgcaagtcatcacatccaagcagaggccccggaaattgacacttatgggcagcaacggacatgagtttgttttccttctaaaaggccatgaagatctgcgccaggatgagcgtgtgatgcagctcttcggcctggttaacacccttctggccaatgacccaacatctcttcggaaaaacctcagcatccagagatacgctgtcatccctttatcgaccaactcgggcctcattggctgggttccccactgtgacacactgcacgccctcatccgggactacagggagaagaagaagatccttctcaacatcgagcatcgcatcatgttgcggatggctccggactatgaccacttgactctgatgcagaaggtggaggtgtttgagcatgccgtcaataatacagctggggacgacctggccaagctgctgtggctgaaaagccccagctccgaggtgtggtttgaccgaagaaccaattatacccgttctttagcggtcatgtcaatggttgggtatattttaggcctgggagatagacacccatccaacctgatgctggaccgtctgagtgggaagatcctgcacattgactttggggactgctttgaggttgctatgacccgagagaagtttccagagaagattccatttagactaacaagaatgttgaccaatgctatggaggttacaggcctggatggcaactacagaatcacatgccacacagtgatggaggtgctgcgagagcacaaggacagtgtcatggccgtgctggaagcctttgtctatgaccccttgctgaactggaggctgatggacacaaataccaaaggcaacaagcgatcccgaacgaggacggattcctactctgctggccagtcagtcgaaattttggacggtgtggaacttggagagccagcccataagaaaacggggaccacagtgccagaatctattcattctttcattggagacggtttggtgaaaccagaggccctaaataagaaagctatccagattattaacagggttcgagataagctcactggtcgggacttctctcatgatgacactttggatgttccaacgcaagttgagctgctcatcaaacaagcgacatcccatgaaaacctctgccagtgctatattggctggtgccctttctggtaactggaggcccagatgtgcccatcacgttttttctgaggcttttgtactttagtaaatgcttccactaaactgaaaccatggtgagaaagtttgactttgttaaatattttgaaatgtaaatgaaaagaactactgtatattaaaagttggtttgaaccaactttctagctgctgttgaagaatatattgtcagaaacacaaggcttgatttggttcccaggacagtgaaacatagtaataccacgtaaatcaagccattcattttggggaacagaagatccataactttagaaatacgggttttgacttaactcacaagagaactcatcataagtacttgctgatggaagaatgacctagttgctcctctcaacatgggtacagcaaactcagcacagccaagaagcctcaggtcgtggagaacatggattaggatcctagactgtaaagacacagaagatgctgacctcacccctgccacctatcccaagacctcactggtctgtggacagcagcagaaatgtttgcaagataggccaaaatgagtacaaaaggtctgtcttccatcagacccagtgatgctgcgactcacacgcttcaattcaagacctgaccgctagtagggaggtttattcagatcgctggcagcctcggctgagcagatgcacagaggggatcactgtgcagtgggaccaccctcactggccttctgcagcagggttctgggatgttttcagtggtcaaaatactctgtttagagcaagggctcagaaaacagaaatactgtcatggaggtgctgaacacagggaaggtctggtacatattggaaattatgagcagaacaaatactcaactaaatgcacaaagtataaagtgtagccatgtctagacaccatgttgtatcagaataatttttgtgccaataaatgacatcagaattttaaacatatgtaaaaaaaaa

SEQ ID NO: 82 - protein, 2549 aa, Homo sapiens
MLGTGPAAATTAATTSSNVSVLQQFASGLKSRNEETRAKAAKELQHYVTMELREMSQEESTRFYDQLNHHIFELVSSSDANERKGGILAIASLIGVEGGNATRIGRFANYLRNLLPSNDPVVMEMASKAIGRLAMAGDTFTAEYVEFEVKRALEWLGADRNEGRRHAAVLVLRELAISVPTFFFQQVQPFFDNIFVAVWDPKQAIREGAVAALRACLILTTQREPKEMQKPQWYRHTFEEAEKGFDETLAKEKGMNRDDRIHGALLILNELVRISSMEGERLREEMEEITQQQLVHDKYCKDLMGFGTKPRHITPFTSFQAVQPQQSNALVGLLGYSSHQGLMGFGTSPSPAKSTLVESRCCRDLMEEKFDQVCQWVLKCRNSKNSLIQMTILNLLPRLAAFRPSAFTDTQYLQDTMNHVLSCVKKEKERTAAFQALGLLSVAVRSEFKVYLPRVLDIIRAALPPKDFAHKRQKAMQVDATVFTCISMLARAMGPGIQQDIKELLEPMLAVGLSPALTAVLYDLSRQIPQLKKDIQDGLLKMLSLVLMHKPLRHPGMPKGLAHQLASPGLTTLPEASDVGSITLALRTLGSFEFEGHSLTQFVRHCADHFLNSEHKEIRMEAARTCSRLLTPSIHLISGHAHVVSQTAVQVVADVLSKLLVVGITDPDPDIRYCVLASLDERFDAHLAQAENLQALFVALNDQVFEIRELAICTVGRLSSMNPAFVMPFLRKMLIQILTELEHSGIGRIKEQSARMLGHLVSNAPRLIRPYMEPILKALILKLKDPDPDPNPGVINNVLATIGELAQVSGLEMRKWVDELFIIIMDMLQDSSLLAKRQVALWTLGQLVASTGYVVEPYRKYPTLLEVLLNFLKTEQNQGTRREAIRVLGLLGALDPYKHKVNIGMIDQSRDASAVSLSESKSSQDSSDYSTSEMLVNMGNLPLDEFYPAVSMVALMRIFRDQSLSHHHTMVVQAITFIFKSLGLKCVQFLPQVMPTFLNVIRVCDGAIREFLFQQLGMLVSFVKSHIRPYMDEIVTLMREFWVMNTSIQSTIILLIEQIVVALGGEFKLYLPQLIPHMLRVFMHDNSPGRIVSIKLLAAIQLFGANLDDYLHLLLPPIVKLFDAPEAPLPSRKAALETVDRLTESLDFTDYASRIIHPIVRTLDQSPELRSTAMDTLSSLVFQLGKKYQIFIPMVNKVLVRHRINHQRYDVLICRIVKGYTLADEEEDPLIYQHRMLRSGQGDALASGPVETGPMKKLHVSTINLQKAWGAARRVSKDDWLEWLRRLSLELLKDSSSPSLRSCWALAQAYNPMARDLFNAAFVSCWSELNEDQQDELIRSIELALTSQDIAEVTQTLLNLAEFMEHSDKGPLPLRDDNGIVLLGERAAKCRAYAKALHYKELEFQKGPTPAILESLISINNKLQQPEAAAGVLEYAMKHFGELEIQATWYEKLHEWEDALVAYDKKMDTNKDDPELMLGRMRCLEALGEWGQLHQQCCEKWTLVNDETQAKMARMAAAAAWGLGQWDSMEEYTCMIPRDTHDGAFYRAVLALHQDLFSLAQQCIDKARDLLDAELTAMAGESYSRAYGAMVSCHMLSELEEVIQYKLVPERREIIRQIWWERLQGCQRIVEDWQKILMVRSLVVSPHEDMRTWLKYASLCGKSGRLALAHKTLVLLLGVDPSRQLDHPLPTVHPQVTYAYMKNMWKSARKIDAFQHMQHFVQTMQQQAQHAIATEDQQHKQELHKLMARCFLKLGEWQLNLQGINESTIPKVLQYYSAATEHDRSWYKAWHAWAVMNFEAVLHYKHQNQARDEKKKLRHASGANITNATTAATTAATATTTASTEGSNSESEAESTENSPTPSPLQKKVTEDLSKTLLMYTVPAVQGFFRSISLSRGNNLQDTLRVLTLWFDYGHWPDVNEALVEGVKAIQIDTWLQVIPQLIARIDTPRPLVGRLIHQLLTDIGRYHPQALIYPLTVASKSTTTARHNAANKILKNMCEHSNTLVQQAMMVSEELIRVAILWHEMWHEGLEEASRLYFGERNVKGMFEVLEPLHAMMERGPQTLKETSFNQAYGRDLMEAQEWCRKYMKSGNVKDLTQAWDLYYHVFRRISKQLPQLTSLELQYVSPKLLMCRDLELAVPGTYDPNQPIIRIQSIAPSLQVITSKQRPRKLTLMGSNGHEFVFLLKGHEDLRQDERVMQLFGLVNTLLANDPTSLRKNLSIQRYAVIPLSTNSGLIGWVPHCDTLHALIRDYREKKKILLNIEHRIMLRMAPDYDHLTLMQKVEVFEHAVNNTAGDDLAKLLWLKSPSSEVWFDRRTNYTRSLAVMSMVGYILGLGDRHPSNLMLDRLSGKILHIDFGDCFEVAMTREKFPEKIPFRLTRMLTNAMEVTGLDGNYRITCHTVMEVLREHKDSVMAVLEAFVYDPLLNWRLMDTNTKGNKRSRTRTDSYSAGQSVEILDGVELGEPAHKKTGTTVPESIHSFIGDGLVKPEALNKKAIQIINRVRDKLTGRDFSHDDTLDVPTQVELLIKQATSHENLCQCYIGWCPFW

SEQ ID NO: 83 - DNA, 3352 bp, Homo sapiens
  CDS (80)..(1981)
cgcggacccggccggcccaggcccgcgcccgccgcggccctgagaggccccggcaggtcccggcccggcggcggcagccatggccggggggccgggcccgggggagcccgcagcccccggcgcccagcacttcttgtacgaggtgccgccctgggtcatgtgccgcttctacaaagtgatggacgccctggagcccgccgactggtgccagttcgccgccctgatcgtgcgcgaccagaccgagctgcggctgtgcgagcgctccgggcagcgcacggccagcgtcctgtggccctggatcaaccgcaacgcccgtgtggccgacctcgtgcacatcctcacgcacctgcagctgctccgtgcgcgggacatcatcacagcctggcaccctcccgccccgcttccgtccccaggcaccactgccccgaggcccagcagcatccctgcacccgccgaggccgaggcctggagcccccggaagttgccatcctcagcctccaccttcctctccccagcttttccaggctcccagacccattcagggcctgagctcggcctggtcccaagccctgcttccctgtggcctccaccgccatctccagccccttcttctaccaagccaggcccagagagctcagtgtccctcctgcagggagcccgcccctttccgttttgctggcccctctgtgagatttcccggggcacccacaacttctcggaggagctcaagatcggggagggtggctttgggtgcgtgtaccgggcggtgatgaggaacacggtgtatgctgtgaagaggctgaaggagaacgctgacctggagtggactgcagtgaagcagagcttcctgaccgaggtggagcagctgtccaggtttcgtcacccaaacattgtggactttgctggctactgtgctcagaacggcttctactgcctggtgtacggcttcctgcccaacggctccctggaggaccgtctccactgccagacccaggcctgcccacctctctcctggcctcagcgactggacatccttctgggtacagcccgggcaattcagtttctacatcaggacagccccagcctcatccatggagacatcaagagttccaacgtccttctggatgagaggctgacacccaagctgggagactttggcctggcccggttcagccgctttgccgggtccagccccagccagagcagcatggtggcccggacacagacagtgcggggcaccctggcctacctgcccgaggagtacatcaagacgggaaggctggctgtggacacggacaccttcagctttggggtggtagtgctagagaccttggctggtcagagggctgtgaagacgcacggtgccaggaccaagtatctggtgtacgagaggctagagaagctgcaggcagtggtggcgggggtgcccgggcattcggaggccgccagctgcatccccccttccccgcaggagaactcctacgtgtccagcactggcagagcccacagtggggctgctccatggcagcccctggcagcgccatcaggagccagtgcccaggcagcagagcagctgcagagaggccccaaccagcccgtggagagtgacgagagcctaggcggcctctctgctgccctgcgctcctggcacttgactccaagctgccctctggacccagcacccctcagggaggccggctgtcctcagggggacacggcaggagaatcgagctgggggagtggcccaggatcccggcccacagccgtggaaggactggcccttggcagctctgcatcatcgtcgtcagagccaccgcagattatcatcaaccctgcccgacagaagatggtccagaagctggccctgtacgaggatggggccctggacagcctgcagctgctgtcgtccagctccctcccaggcttgggcctggaacaggacaggcaggggcccgaagaaagtgatgaatttcagagctgatgtgttcacctgggcagatcccccaaatccggaagtcaaagttctcatggtcagaagttctcatggtgcacgagtcctcagcactctgccggcagtgggggtgggggcccatgcccgcgggggagagaaggaggtggccctgctgttctaggctctgtgggcataggcaggcagagtggaaccctgcctccatgccagcatctgggggcaaggaaggctggcatcatccagtgaggaggctggcgcatgttgggaggctgctggctgcacagacccgtgaggggaggagaggggctgctgtgcaggggtgtggagtagggagctggctcccctgagagccatgcagggcgtctgcagcccaggcctctggcagcagctctttgcccatctctttggacagtggccaccctgcacaatggggccgacgaggcctagggccctcctacctgcttacaatttggaaaagtgtggccgggtgcggtggctcacgcctgtaatcccagcactttgggaggccaaggcaggaggatcgctggagcccagtaggtcaagaccagccagggcaacatgatgagaccctgtctctgccaaaaaattttttaaactattagcctggcgtggtagcgcacgcctgtggtcccagctgctggggaggctgaagtaggaggatcatttatgcttgggaggtcgaggctgcagtgagtcatgattgtatgactgcactccagcctgggtgacagagcaagaccctgtttcaaaaagaaaaaccctgggaaaagtgaagtatggctgtaagtctcatggttcagtcctagcaagaagcgagaattctgagatcctccagaaagtcgagcagcacccacctccaacctcgggccagtgtcttcaggctttactggggacctgcgagctggcctaatgtggtggcctgcaagccaggccatccctgggcgccacagacgagctccgagccaggtcaggcttcggaggccacaagctcagcctcaggcccaggcactgattgtggcagaggggccactacccaaggtctagctaggcccaagacctagttacccagacagtgagaagcccctggaaggcagaaaagttgggagcatggcagacagggaagggaaacattttcagggaaaagacatgtatcacatgtcttcagaagcaagtcaggtttcatgtaaccgagtgtcctcttgcgtgtccaaaagtagcccagggctgtagcacaggcttcacagtgattttgtgttcagccgtgagtcacactacatgcccccgtgaagctgggcattggtgacgtccaggttgtccttgagtaataaaaacgtatgttgcaataaaaaaaaaaaaaaaaaa

SEQ ID NO: 84 - protein, 633 aa, Homo sapiens
MAGGPGPGEPAAPGAQHFLYEVPPWVMCRFYKVMDALEPADWCQFAALIVRDQTELRLCERSGQRTASVLWPWINRNARVADLVHILTHLQLLRARDIITAWHPPAPLPSPGTTAPRPSSIPAPAEAEAWSPRKLPSSASTFLSPAFPGSQTHSGPELGLVPSPASLWPPPPSPAPSSTKPGPESSVSLLQGARPFPFCWPLCEISRGTHNFSEELKIGEGGFGCVYRAVMRNTVYAVKRLKENADLEWTAVKQSFLTEVEQLSRFRHPNIVDFAGYCAQNGFYCLVYGFLPNGSLEDRLHCQTQACPPLSWPQRLDILLGTARAIQFLHQDSPSLIHGDIKSSNVLLDERLTPKLGDFGLARFSRFAGSSPSQSSMVARTQTVRGTLAYLPEEYIKTGRLAVDTDTFSFGVVVLETLAGQRAVKTHGARTKYLVYERLEKLQAVVAGVPGHSEAASCIPPSPQENSYVSSTGRAHSGAAPWQPLAAPSGASAQAAEQLQRGPNQPVESDESLGGLSAALRSWHLTPSCPLDPAPLREAGCPQGDTAGESSWGSGPGSRPTAVEGLALGSSASSSSEPPQIIINPARQKMVQKLALYEDGALDSLQLLSSSSLPGLGLEQDRQGPEESDEFQS

SEQ ID NO: 85 - DNA, 8743 bp, Homo sapiens
  CDS (53)..(3781)
ggttgtttttcggagcctccctctgctcagcgttggtggtggcggtggcagcatggcgagccctccggagagcgatggcttctcggacgtgcgcaaggtgggctacctgcgcaaacccaagagcatgcacaaacgcttcttcgtactgcgcgcggccagcgaggctgggggcccggcgcgcctcgagtactacgagaacgagaagaagtggcggcacaagtcgagcgcccccaaacgctcgatcccccttgagagctgcttcaacatcaacaagcgggctgactccaagaacaagcacctggtggctctctacacccgggacgagcactttgccatcgcggcggacagcgaggccgagcaagacagctggtaccaggctctcctacagctgcacaaccgtgctaagggccaccacgacggagctgcggccctcggggcgggaggtggtgggggcagctgcagcggcagctccggccttggtgaggctggggaggacttgagctacggtgacgtgcccccaggacccgcattcaaagaggtctggcaagtgatcctgaagcccaagggcctgggtcagacaaagaacctgattggtatctaccgcctttgcctgaccagcaagaccatcagcttcgtgaagctgaactcggaggcagcggccgtggtgctgcagctgatgaacatcaggcgctgtggccactcggaaaacttcttcttcatcgaggtgggccgttctgccgtgacggggcccggggagttctggatgcaggtggatgactctgtggtggcccagaacatgcacgagaccatcctggaggccatgcgggccatgagtgatgagttccgccctcgcagcaagagccagtcctcgtccaactgctctaaccccatcagcgtccccctgcgccggcaccatctcaacaatcccccgcccagccaggtggggctgacccgccgatcacgcactgagagcatcaccgccacctccccggccagcatggtgggcgggaagccaggctccttccgtgtccgcgcctccagtgacggcgaaggcaccatgtcccgcccagcctcggtggacggcagccctgtgagtcccagcaccaacagaacccacgcccaccggcatcggggcagcgcccggctgcaccccccgctcaaccacagccgctccatccccatgccggcttcccgctgctcgccttcggccaccagcccggtcagtctgtcgtccagtagcaccagtggccatggctccacctcggattgtctcttcccacggcgatctagtgcttcggtgtctggttcccccagcgatggcggtttcatctcctcggatgagtatggctccagtccctgcgatttccggagttccttccgcagtgtcactccggattccctgggccacaccccaccagcccgcggtgaggaggagctaagcaactatatctgcatgggtggcaaggggccctccaccctgaccgcccccaacggtcactacattttgtctcggggtggcaatggccaccgctgcaccccaggaacaggcttgggcacgagtccagccttggctggggatgaagcagccagtgctgcagatctggataatcggttccgaaagagaactcactcggcaggcacatcccctaccattacccaccagaagaccccgtcccagtcctcagtggcttccattgaggagtacacagagatgatgcctgcctacccaccaggaggtggcagtggaggccgactgccgggacacaggcactccgccttcgtgcccacccgctcctacccagaggagggtctggaaatgcaccccttggagcgtcggggggggcaccaccgcccagacagctccaccctccacacggatgatggctacatgcccatgtccccaggggtggccccagtgcccagtggccgaaagggcagtggagactatatgcccatgagccccaagagcgtatctgccccacagcagatcatcaatcccatcagacgccatccccagagagtggaccccaatggctacatgatgatgtcccccagcggtggctgctctcctgacattggaggtggccccagcagcagcagcagcagcagcaacgccgtcccttccgggaccagctatggaaagctgtggacaaacggggtagggggccaccactctcatgtcttgcctcaccccaaacccccagtggagagcagcggtggtaagctcttaccttgcacaggtgactacatgaacatgtcaccagtgggggactccaacaccagcagcccctccgactgctactacggccctgaggacccccagcacaagccagtcctctcctactactcattgccaagatcctttaagcacacccagcgccccggggagccggaggagggtgcccggcatcagcacctccgcctttccactagctctggtcgccttctctatgctgcaacagcagatgattcttcctcttccaccagcagcgacagcctgggtgggggatactgcggggctaggctggagcccagccttccacatccccaccatcaggttctgcagccccatctgcctcgaaaggtggacacagctgctcagaccaatagccgcctggcccggcccacgaggctgtccctgggggatcccaaggccagcaccttacctcgggcccgagagcagcagcagcagcagcagcccttgctgcaccctccagagcccaagagcccgggggaatatgtcaatattgaatttgggagtgatcagtctggctacttgtctggcccggtggctttccacagctcaccttctgtcaggtgtccatcccagctccagccagctcccagagaggaagagactggcactgaggagtacatgaagatggacctggggccgggccggagggcagcctggcaggagagcactggggtcgagatgggcagactgggccctgcacctcccggggctgctagcatttgcaggcctacccgggcagtgcccagcagccggggtgactacatgaccatgcagatgagttgtccccgtcagagctacgtggacacctcgccagctgcccctgtaagctatgctgacatgcgaacaggcattgctgcagaggaggtgagcctgcccagggccaccatggctgctgcctcctcatcctcagcagcctctgcttccccgactgggcctcaaggggcagcagagctggctgcccactcgtccctgctggggggcccacaaggacctgggggcatgagcgccttcacccgggtgaacctcagtcctaaccgcaaccagagtgccaaagtgatccgtgcagacccacaagggtgccggcggaggcatagctccgagactttctcctcaacacccagtgccacccgggtgggcaacacagtgccctttggagcgggggcagcagtagggggcggtggcggtagcagcagcagcagcgaggatgtgaaacgccacagctctgcttcctttgagaatgtgtggctgaggcctggggagcttgggggagcccccaaggagccagccaaactgtgtggggctgctgggggtttggagaatggtcttaactacatagacctggatttggtcaaggacttcaaacagtgccctcaggagtgcacccctgaaccgcagcctcccccacccccaccccctcatcaacccctgggcagcggtgagagcagctccacccgccgctcaagtgaggatttaagcgcctatgccagcatcagtttccagaagcagccagaggaccgtcagtagctcaactggacatcacagcagaatgaagacctaaatgacctcagcaaatcctcttctaactcatgggtacccagactctaaatatttcatgattcacaactaggacctcatatcttcctcatcagtagatggtacgatgcatccatttcagtttgtttactttatccaatcctcaggatttcattgactgaactgcacgttctatattgtgccaagcgaaaaaaaaaaatgcactgtgacaccagaataatgagtctgcataaacttcatcttcaaccttaaggacttagctggccacagtgagctgatgtgcccaccaccgtgtcatgagagaatgggtttactctcaatgcattttcaagatacatttcatctgctgctgaaactgtgtacgacaaagcatcattgtaaattatttcatacaaaactgttcacgttgggtggagagagtattaaatatttaacataggttttgatttatatgtgtaattttttaaatgaaaatgtaacttttcttacagcacatcttttttttggatgtgggatggaggtatacaatgttctgttgtaaagagtggagcaaatgcttaaaacaaggcttaaaagagtagaatagggtatgatccttgttttaagattgtaattcagaaaacataatataagaatcatagtgccatagatggttctcaattgtatagttatatttgctgatactatctcttgtcatataaacctgatgttgagctgagttccttataagaattaatcttaattttgtattttttcctgtaagacaataggccatgttaattaaactgaagaaggatatatttggctgggtgttttcaaatgtcagcttaaaattggtaattgaatggaagcaaaattataagaagaggaaattaaagtcttccattgcatgtattgtaaacagaaggagatgggtgattccttcaattcaaaagctctctttggaatgaacaatgtgggcgtttgtaaattctggaaatgtctttctattcataataaactagatactgttgatcttttcttctgtcccctccccccaccacttctgtaagtttcctgctctattcccaccatttttttctgtgcacacattatgatatatttcatttcctgcattgtcttgagaaagatggtaaggcaagtgagctgttgctaaccagaaattaaaattccagtaagtgtttttcattatgaccagggctatgtgtcaccttccctaagactcttaccttatctcatattttttgagaacttccagtgttacattatttaactgaatgtaattggcccatttgccttggtgggtgctggcctattagtgattagttaacaaaacacagcgtacagagagcacagaaaagcttaatgacctgctactgaaacacctagccagcagtgaaaatgttaattcttttcttgtttggaaagtatacacgtcttggaattttttccacgtgaaaaacaaatggcaatgaatgcatttaaagatattgccgacagatttttaaatctttttaccaggaaacttcctaaaggttaaatgaattaatgcaaatatcaggctccctctgagtctgtgggagcctctatctctctatcaggaattcgcatccctactattgggaggagcaacattttatttctctgaacgcctaagctccctgggtgggagtggggactacaaggtaggggccagggttggagggcattgtagtggctgctgcctcctgatgaactgtttggggaccccagctctactcaaaagggagcggagataaatggaacccctcacactgctgaggcccgtgttactgttcattcagccaggtggcatgtacctcacagactgttgtgcagtgtccgttattgcagattttaatcatttgcatgctcatcaatttctaagataaatagggtctagagtcataagaatccattgttttcaaggaacttgcagaattacatcatttcctattagtagagagcactacccattttgaaaatctgatatgaaagttgttttttactcttgtaaaaaaagactttcttagtcaaactaacttttcatattttcaagcattctgattcatactcttgctagtggaagaagagagcaagctgccctgctcttttcctttgaggactgaaatagttaaagagaaatcaatgaacaaagtcactcccaaccattttcctgtaaagctggttattatttctcaaggaacctacactttgaatatgtgttaccgagatacctctacatgtggaattatcaacatgttttgaatgagagcagaaatgaacagactggaaaaatctatctcttggtttctatttctctgactttttgagtcgaaaagcataaaggtagaaattcttatttaagctgcttctagtggtgcctgagctggttttgatggtggcatcaaactaccgatttaaaactggaagttgctggtactcaaaccaaaagttcatactctggcgacacgaagggtttcctttgagcaacgtcagctgctgagtccttgtgttcagttcccattgaggagagttggcttttatccatttcaaagcatttgtaggccagccaagggctttcattattgaggcttctagtggcctctggttaacctagaagttagtgggtttttcttgatgacaccaacctctcacagcgtttttccttagagacttaagcagagttttaaaatcctcttttgcgaaaagaacaaatatgttttatgactttgatgatatcttcattctgggcaaaagaatggccctagaaccagctagaagtgaagagaatccattaatgatcaaccacctgagtcaataatgagaaatcagtactgatgttacatttgtggctatttcttgctgactttcaaaggtcaaggactcttgactaatccagtgactgcaaaaatggatctactaaaagtcatctagccagaagtagagatttttaacctttctttccctggcttttgtcttctagctatcatttaaatttgagacatttgaagtattaagaaacaatttttctgtatggtaagaaacagtattttacaatactgaagccctgttttattcaatcttgcatcttgaatacaatataccacaaagtcggaaactttatatttatttactgcaggtggttaaaaaaaggggggaaagggtttcaccatccactgacaacgagagccatgacaaatagtatccatgtgcagtcttccaactgctggtgacaatgaccccatatttggtctcatgctgcttttgcagagcactctgtaggttagtccatcacacaaggaggccctgaatccagacactgtgaattaagaccttggcggggagagatgtgacccttttggtaggaatgggaagaagaatgggtggaagccaatatgaaatttcttctttgcaatgacttgacaggggagttaatgttcctaggatgccatgaatgatgaatgttagttggaggtaatgctgtatatgtgtgtgtgtgtgtgtgtgtgtgtttgtgtgtgtgtatatatatgtgtgtgtgtatatatatgtgacatgtgtgtgtctttgtgtgtgtgtatatatatgtgacgtgtgtgtgggatgtgtgtgtgtatatatagatgaatatatacaaatatatagatatatacacacatatatagatatatatacacatatatagatatatatacacacatatatagatacacatatgtgtgtgtgtgtatatatatatatatatatatatagatgtataggcttgtgagaaacttgagaggaagaagcatgctcttctaggaatgtgaggaaatatgaccttgccaagactaaaagacctctagactgtgagctcagttatggagaacaaaaacagcttcatagtgagtagaacaccgaggataaacactggggccatgggtcctttctgaggcagcgccacagaagatctttgtggtccttccgtagttctgtaagtctgtctcctaagtatgggtagagaatatgtagcctgttgtgtgtctcccactacttgtaaacagagcatcacattaggggcagggaggaggtggaatgatattggaggtgcttaaccctactcgaggaattaattatgaataaagagcttataattagctaacatgactagaaaacacatgacttaggtggagagttagctttcttttctagtttgtgtatgacttgccatttgtgacgtatacaccaaaagatctggtgttttagacttctgccattcacttggcatttaaatctctctttgcttatgctgttaacgagtatgccataggataggacaaattcagtaaacaggaaaacttgtccatatttgcatagacatttgtagggttttttttttctttttctttttagaacttcaccattggcttaagaatgtagttcccaaaacaattttttcttgcaaagtactttccttacacctcttggctacagggtgggccaaattaaacatatatgtattttcatttaatgtatgtgcagtttggtttatcatcttaagatggtggtgctgccccggtgctacttcatctgtgtacacaaagaccaatgcatggtctgtattgctaccaaaacatttactgtatatatgtttataacatgtattatgtatatatgtaatgggtgccaggccaggtatatattttttatttagaagtgtttcacttttccaagttttctttatagtgttatgcttattttcaattttttttttcctgattctgtctggtacttagaattgtagtgtcttcatcatcaattaaagaaaactgtctaaatgaattcatggatgtaaatattagtggtccttaatgtctttgattgctggacatgaaacaaactgccaattaaattttgcggagacaaaaaaaa

SEQ ID NO: 86 - protein, 1242 aa, Homo sapiens
MASPPESDGFSDVRKVGYLRKPKSMHKRFFVLRAASEAGGPARLEYYENEKKWRHKSSAPKRSIPLESCFNINKRADSKNKHLVALYTRDEHFAIAADSEAEQDSWYQALLQLHNRAKGHHDGAAALGAGGGGGSCSGSSGLGEAGEDLSYGDVPPGPAFKEVWQVILKPKGLGQTKNLIGIYRLCLTSKTISFVKLNSEAAAVVLQLMNIRRCGHSENFFFIEVGRSAVTGPGEFWMQVDDSVVAQNMHETILEAMRAMSDEFRPRSKSQSSSNCSNPISVPLRRHHLNNPPPSQVGLTRRSRTESITATSPASMVGGKPGSFRVRASSDGEGTMSRPASVDGSPVSPSTNRTHAHRHRGSARLHPPLNHSRSIPMPASRCSPSATSPVSLSSSSTSGHGSTSDCLFPRRSSASVSGSPSDGGFISSDEYGSSPCDFRSSFRSVTPDSLGHTPPARGEEELSNYICMGGKGPSTLTAPNGHYILSRGGNGHRCTPGTGLGTSPALAGDEAASAADLDNRFRKRTHSAGTSPTITHQKTPSQSSVASIEEYTEMMPAYPPGGGSGGRLPGHRHSAFVPTRSYPEEGLEMHPLERRGGHHRPDSSTLHTDDGYMPMSPGVAPVPSGRKGSGDYMPMSPKSVSAPQQIINPIRRHPQRVDPNGYMMMSPSGGCSPDIGGGPSSSSSSSNAVPSGTSYGKLWTNGVGGHHSHVLPHPKPPVESSGGKLLPCTGDYMNMSPVGDSNTSSPSDCYYGPEDPQHKPVLSYYSLPRSFKHTQRPGEPEEGARHQHLRLSTSSGRLLYAATADDSSSSTSSDSLGGGYCGARLEPSLPHPHHQVLQPHLPRKVDTAAQTNSRLARPTRLSLGDPKASTLPRAREQQQQQQPLLHPPEPKSPGEYVNIEFGSDQSGYLSGPVAFHSSPSVRCPSQLQPAPREEETGTEEYMKMDLGPGRRAAWQESTGVEMGRLGPAPPGAASICRPTRAVPSSRGDYMTMQMSCPRQSYVDTSPAAPVSYADMRTGIAAEEVSLPRATMAAASSSSAASASPTGPQGAAELAAHSSLLGGPQGPGGMSAFTRVNLSPNRNQSAKVIRADPQGCRRRHSSETFSSTPSATRVGNTVPFGAGAAVGGGGGSSSSSEDVKRHSSASFENVWLRPGELGGAPKEPAKLCGAAGGLENGLNYIDLDLVKDFKQCPQECTPEPQPPPPPPPHQPLGSGESSSTRRSSEDLSAYASISFQKQPEDRQ

SEQ ID NO: 87 - DNA, 2886 bp, Homo sapiens
  CDS (185)..(1138)
agattcctacttcttacgccccccacatcacccgcctcgagacctcaagggtagaggtgggcacccccgcctccgcacttttgctcggggctccagattgtagggcagggcggcgcttctcggaaagcgaaagccggcggggcggggcgggtgccgcaggagaaagaggaagcgctggcagacaatgcgacccgaccgcgctgaggctccaggaccgcccgccatggctgcaggaggtcccggcgcggggtctgcggccccggtctcctccacatcctcccttcccctggctgctctcaacatgcgagtgcggcgccgcctgtctctgttcttgaacgtgcggacacaggtggcggccgactggaccgcgctggcggaggagatggactttgagtacttggagatccggcaactggagacacaagcggaccccactggcaggctgctggacgcctggcagggacgccctggcgcctctgtaggccgactgctcgagctgcttaccaagctgggccgcgacgacgtgctgctggagctgggacccagcattgaggaggattgccaaaagtatatcttgaagcagcagcaggaggaggctgagaagcctttacaggtggccgctgtagacagcagtgtcccacggacagcagagctggcgggcatcaccacacttgatgaccccctggggcatatgcctgagcgtttcgatgccttcatctgctattgccccagcgacatccagtttgtgcaggagatgatccggcaactggaacagacaaactatcgactgaagttgtgtgtgtctgaccgcgatgtcctgcctggcacctgtgtctggtctattgctagtgagctcatcgaaaagaggttggctagaaggccacggggtgggtgccgccggatggtggtggttgtctctgatgattacctgcagagcaaggaatgtgacttccagaccaaatttgcactcagcctctctccaggtgcccatcagaagcgactgatccccatcaagtacaaggcaatgaagaaagagttccccagcatcctgaggttcatcactgtctgcgactacaccaacccctgcaccaaatcttggttctggactcgccttgccaaggccttgtccctgccctgaagactgttctgaggccctgggtgtgtgtgtatctgtctgcctgtccatgtacttctgccctgcctcctcctttcgttgtaggaggaatctgtgctctacttacctctcaattcctggagatgccaacttcacagacacgtctgcagcagctggacatcacatttcatgtcctgcatggaaccagtggctgtgagtggcatgtccacttgctggattatcagccaggacactatagaacaggaccagctgagactaagaaggaccagcagagccagctcagctctgagccattcacacatcttcaccctcagtttcctcacttgaggagtgggatggggagaacagagagtagctgtgtttgaatccctgtaggaaatggtgaagcatagctctgggtctcctgggggagaccaggcttggctgcgggagagctggctgttgctggactacatgctggccactgctgtgaccacgacactgctggggcagcttcttccacagtgatgcctactgatgcttcagtgcctctgcacaccgcccattccacttcctccttccccacagggcaggtggggaagcagtttggcccagcccaaggagaccccaccttgagccttatttcctaatgggtccacctctcatctgcatctttcacacctcccagcttctgcccaaccttcagcagtgacaagtccccaagagactcgcctgagcagcttgggctgcttttcatttccacctgtcaggatgcctgtggtcatgctctcagctccacctggcatgagaagggatcctggcctctggcatattcatcaagtatgagttctggggatgagtcactgtaatgatgtgagcagggagccttcctccctgggccacctgcagagagctttcccaccaactttgtaccttgattgccttacaaagttatttgtttacaaacagcgaccatataaaagcctcctgccccaaagcttgtgggcacatgggcacatacagactcacatacagacacacacatatatgtacagacatgtactctcacacacacaggcaccagcatacacacgtttttctaggtacagctcccaggaacagctaggtgggaaagtcccatcactgagggagcctaaccatgtccctgaacaaaaattgggcactcatctattccttttctcttgtgtccctactcattgaaaccaaactctggaaaggacccaatgtaccagtatttatacctctaatgaagcacagagagaggaagagagctgcttaaactcacacaacaatgaactgcagacacagctgttctctccctctctccttcccagagcaatttatactttaccctcaggctgtcctctggggagaaggtgccatggtcttaggtgtctgtgccccaggacagaccctaggaccctaaatccaatagaaaatgcatatctttgctccactttcagccaggctggagcaaggtaccttttcttaggatcttgggagggaatggatgcccctctctgcatgatcttgttgaggcatttagctgccatgcacctgtccccctttaatactgggcattttaaagccatctcaagaggcatcttctacatgttttgtacgcattaaaataatttcaaagatatctgagaaaagccgatatttgccattcttcctatatcctggaatatatcttgcatcctgagtttataataataaataatattctaccttggaaaaaaaaaaaaaaa

SEQ ID NO: 88 - protein, 317 aa, Homo sapiens
MRPDRAEAPGPPAMAAGGPGAGSAAPVSSTSSLPLAALNMRVRRRLSLFLNVRTQVAADWTALAEEMDFEYLEIRQLETQADPTGRLLDAWQGRPGASVGRLLELLTKLGRDDVLLELGPSIEEDCQKYILKQQQEEAEKPLQVAAVDSSVPRTAELAGITTLDDPLGHMPERFDAFICYCPSDIQFVQEMIRQLEQTNYRLKLCVSDRDVLPGTCVWSIASELIEKRLARRPRGGCRRMVVVVSDDYLQSKECDFQTKFALSLSPGAHQKRLIPIKYKAMKKEFPSILRFITVCDYTNPCTKSWFWTRLAKALSLP

SEQ ID NO: 89 - DNA, 4093 bp, Homo sapiens
  CDS (468)..(3377)
gtgagagagtgagcgagacagaaagagagagaagtgcaccagcgagccggggcaggaagaggaggtttcgccaccggagcggcccggcgacgcgctgacagcttcccctgcccttcccgtcggtcgggccgccagccgccgcagccctcggcctgcacgcagccaccggccccgctcccggagcccagcgccgccgaggccgcagccgcccggccagtaaggcggcgccgccgcccggccaccgcgcgccctgcgcttccctccgcccgcgctgcggccatggcgcggcgctgactggcctggcccggccccgccgcgctcccgctcgccccgacccgcactcgggcccgcccgggctccggcctgccgccgcctcttccttctccagccggcaggcccgcgccgcttaggagggagagcccacccgcgccaggaggccgaacgcggactcgccacccggcttcagaatggcagaagatgatccatatttgggaaggcctgaacaaatgtttcatttggatccttctttgactcatacaatatttaatccagaagtatttcaaccacagatggcactgccaacagcagatggcccataccttcaaatattagagcaacctaaacagagaggatttcgtttccgttatgtatgtgaaggcccatcccatggtggactacctggtgcctctagtgaaaagaacaagaagtcttaccctcaggtcaaaatctgcaactatgtgggaccagcaaaggttattgttcagttggtcacaaatggaaaaaatatccacctgcatgcccacagcctggtgggaaaacactgtgaggatgggatctgcactgtaactgctggacccaaggacatggtggtcggcttcgcaaacctgggtatacttcatgtgacaaagaaaaaagtatttgaaacactggaagcacgaatgacagaggcgtgtataaggggctataatcctggactcttggtgcaccctgaccttgcctatttgcaagcagaaggtggaggggaccggcagctgggagatcgggaaaaagagctaatccgccaagcagctctgcagcagaccaaggagatggacctcagcgtggtgcggctcatgtttacagcttttcttccggatagcactggcagcttcacaaggcgcctggaacccgtggtatcagacgccatctatgacagtaaagcccccaatgcatccaacttgaaaattgtaagaatggacaggacagctggatgtgtgactggaggggaggaaatttatcttctttgtgacaaagttcagaaagatgacatccagattcgattttatgaagaggaagaaaatggtggagtctgggaaggatttggagatttttcccccacagatgttcatagacaatttgccattgtcttcaaaactccaaagtataaagatattaatattacaaaaccagcctctgtgtttgtccagcttcggaggaaatctgacttggaaactagtgaaccaaaacctttcctctactatcctgaaatcaaagataaagaagaagtgcagaggaaacgtcagaagctcatgcccaatttttcggatagtttcggcggtggtagtggtgctggagctggaggcggaggcatgtttggtagtggcggtggaggagggggcactggaagtacaggtccagggtatagcttcccacactatggatttcctacttatggtgggattactttccatcctggaactactaaatctaatgctgggatgaagcatggaaccatggacactgaatctaaaaaggaccctgaaggttgtgacaaaagtgatgacaaaaacactgtaaacctctttgggaaagttattgaaaccacagagcaagatcaggagcccagcgaggccaccgttgggaatggtgaggtcactctaacgtatgcaacaggaacaaaagaagagagtgctggagttcaggataacctctttctagagaaggctatgcagcttgcaaagaggcatgccaatgcccttttcgactacgcggtgacaggagacgtgaagatgctgctggccgtccagcgccatctcactgctgtgcaggatgagaatggggacagtgtcttacacttagcaatcatccaccttcattctcaacttgtgagggatctactagaagtcacatctggtttgatttctgatgacattatcaacatgagaaatgatctgtaccagacgcccttgcacttggcagtgatcactaagcaggaagatgtggtggaggatttgctgagggctggggccgacctgagccttctggaccgcttgggtaactctgttttgcacctagctgccaaagaaggacatgataaagttctcagtatcttactcaagcacaaaaaggcagcactacttcttgaccaccccaacggggacggtctgaatgccattcatctagccatgatgagcaatagcctgccatgtttgctgctgctggtggccgctggggctgacgtcaatgctcaggagcagaagtccgggcgcacagcactgcacctggctgtggagcacgacaacatctcattggcaggctgcctgctcctggagggtgatgcccatgtggacagtactacctacgatggaaccacacccctgcatatagcagctgggagagggtccaccaggctggcagctcttctcaaagcagcaggagcagatcccctggtggagaactttgagcctctctatgacctggatgactcttgggaaaatgcaggagaggatgaaggagttgtgcctggaaccacgcctctagatatggccaccagctggcaggtatttgacatattaaatgggaaaccatatgagccagagtttacatctgatgatttactagcacaaggagacatgaaacagctggctgaagatgtgaagctgcagctgtataagttactagaaattcctgatccagacaaaaactgggctactctggcgcagaaattaggtctggggatacttaataatgccttccggctgagtcctgctccttccaaaacacttatggacaactatgaggtctctgggggtacagtcagagagctggtggaggccctgagacaaatgggctacaccgaagcaattgaagtgatccaggcagcctccagcccagtgaagaccacctctcaggcccactcgctgcctctctcgcctgcctccacaaggcagcaaatagacgagctccgagacagtgacagtgtctgcgacagcggcgtggagacatccttccgcaaactcagctttaccgagtctctgaccagtggtgcctcactgctaactctcaacaaaatgccccatgattatgggcaggaaggacctctagaaggcaaaatttagcctgctgacaatttcccacaccgtgtaaaccaaagccctaaaattccactgcgttgtccacaagacagaagctgaagtgcatccaaaggtgctcagagagccggcccgcctgaatcattctcgatttaactcgagaccttttcaacttggcttcctttcttggttcataaatgaattttagtttggttcacttacagatagtatctagcaatcacaacactggctgagcggatgcatctggggatgaggttgcttactaagctttgccagctgctgctggatcacagctgctttctgttgtcattgctgttgtccctctgctacgttcctattgtcattaaaggtatcacggtcgccacctggcattccttctgaccacagcatcattttgcattcaaattaagggttaagaaaagagatattttaaaatgagagtcacttgatgtgccattttaaaaaaaaaggcatattgctttttctaatgtggttatttctctgatttgcaaaaaaaaaaaaaaaaaaaatacttgtcaatatttaaacatggttacaatcattgctgaaaatggtattttcccccttttctgcattttgctattgtaaatatgttttttagatcaaatactttaaaggaaaaaatgttggatttataaatgctattttttattttacttttataataaaaggaaaagcaaattgatgacctcaaaaaaaaa

SEQ ID NO: 90 - protein, 969 aa, Homo sapiens
MAEDDPYLGRPEQMFHLDPSLTHTIFNPEVFQPQMALPTADGPYLQILEQPKQRGFRFRYVCEGPSHGGLPGASSEKNKKSYPQVKICNYVGPAKVIVQLVTNGKNIHLHAHSLVGKHCEDGICTVTAGPKDMVVGFANLGILHVTKKKVFETLEARMTEACIRGYNPGLLVHPDLAYLQAEGGGDRQLGDREKELIRQAALQQTKEMDLSVVRLMFTAFLPDSTGSFTRRLEPVVSDAIYDSKAPNASNLKIVRMDRTAGCVTGGEEIYLLCDKVQKDDIQIRFYEEEENGGVWEGFGDFSPTDVHRQFAIVFKTPKYKDINITKPASVFVQLRRKSDLETSEPKPFLYYPEIKDKEEVQRKRQKLMPNFSDSFGGGSGAGAGGGGMFGSGGGGGGTGSTGPGYSFPHYGFPTYGGITFHPGTTKSNAGMKHGTMDTESKKDPEGCDKSDDKNTVNLFGKVIETTEQDQEPSEATVGNGEVTLTYATGTKEESAGVQDNLFLEKAMQLAKRHANALFDYAVTGDVKMLLAVQRHLTAVQDENGDSVLHLAIIHLHSQLVRDLLEVTSGLISDDIINMRNDLYQTPLHLAVITKQEDVVEDLLRAGADLSLLDRLGNSVLHLAAKEGHDKVLSILLKHKKAALLLDHPNGDGLNAIHLAMMSNSLPCLLLLVAAGADVNAQEQKSGRTALHLAVEHDNISLAGCLLLEGDAHVDSTTYDGTTPLHIAAGRGSTRLAALLKAAGADPLVENFEPLYDLDDSWENAGEDEGVVPGTTPLDMATSWQVFDILNGKPYEPEFTSDDLLAQGDMKQLAEDVKLQLYKLLEIPDPDKNWATLAQKLGLGILNNAFRLSPAPSKTLMDNYEVSGGTVRELVEALRQMGYTEAIEVIQAASSPVKTTSQAHSLPLSPASTRQQIDELRDSDSVCDSGVETSFRKLSFTESLTSGASLLTLNKMPHDYGQEGPLEGKI

SEQ ID NO: 91 - DNA, 7069 bp, Homo sapiens
  CDS (162)..(3470)
aactgcaacacttcctctgcatctggatatgaagggagccccagaaaagcggaagaatttagacgcacactgggtaggtttgaatttgttttgttttcaaaaattaaacaaatgatccttcagcatcatcgcctccgctgctttatcaggtcgcatagggcatggagctggagaactataaacagcccgtggtgctgagagaggacaactgccgaaggcgccggaggatgaagccgcgcagtgctgcggccagcctgtcctccatggagctcatccccatcgagttcgtgctgcccaccagccagcgcaaatgcaagagccccgaaacggcgctgctgcacgtggccggccacggcaacgtggagcagatgaaggcccaggtgtggctgcgagcgctggagaccagcgtggcggcggacttctaccaccggctgggaccgcatcacttcctcctgctctatcagaagaaggggcagtggtacgagatctacgacaagtaccaggtggtgcagactctggactgcctgcgctactggaaggccacgcaccggagcccgggccagatccacctggtgcagcggcacccgccctccgaggagtcccaagccttccagcggcagctcacggcgctgattggctatgacgtcactgacgtcagcaacgtgcacgacgatgagctggagttcacgcgccgtggcttggtgaccccgcgcatggcggaggtggccagccgcgaccccaagctctacgccatgcacccgtgggtgacgtccaagcccctcccggagtacctgtggaagaagattgccaacaactgcatcttcatcgtcattcaccgcagcaccaccagccagaccattaaggtctcacccgacgacacccccggcgccatcctgcagagcttcttcaccaagatggccaagaagaaatctctgatggatattcccgaaagccaaagcgaacaggattttgtgctgcgcgtctgtggccgggatgagtacctggtgggcgaaacgcccatcaaaaacttccagtgggtgaggcactgcctcaagaacggagaagagattcacgtggtactggacacgcctccagacccggccctagacgaggtgaggaaggaagagtggccactggtggatgactgcacgggagtcaccggctaccatgagcagcttaccatccacggcaaggaccacgagagtgtgttcaccgtgtccctgtgggactgcgaccgcaagttcagggtcaagatcagaggcattgatatccccgtcctgcctcggaacaccgacctcacagtttttgtagaggcaaacatccagcatgggcaacaagtcctttgccaaaggagaaccagccccaaacccttcacagaggaggtgctgtggaatgtgtggcttgagttcagtatcaaaatcaaagacttgcccaaaggggctctactgaacctccagatctactgcggtaaagctccagcactgtccagcaaggcctctgcagagtcccccagttctgagtccaagggcaaagttcagcttctctattatgtgaacctgctgctgatagaccaccgtttcctcctgcgccgtggagaatacgtcctccacatgtggcagatatctgggaagggagaagaccaaggaagcttcaatgctgacaaactcacgtctgcaactaacccagacaaggagaactcaatgtccatctccattcttctggacaattactgccacccgatagccctgcctaagcatcagcccacccctgacccggaaggggaccgggttcgagcagaaatgcccaaccagcttcgcaagcaattggaggcgatcatagccactgatccacttaaccctctcacagcagaggacaaagaattgctctggcattttagatacgaaagccttaagcacccaaaagcatatcctaagctatttagttcagtgaaatggggacagcaagaaattgtggccaaaacataccaattgttggccagaagggaagtctgggatcaaagtgctttggatgttgggttaacaatgcagctcctggactgcaacttctcagatgaaaatgtaagagccattgcagttcagaaactggagagcttggaggacgatgatgttctgcattaccttctacaattggtccaggctgtgaaatttgaaccataccatgatagcgcccttgccagatttctgctgaagcgtggtttaagaaacaaaagaattggtcactttttgttttggttcttgagaagtgagatagcccagtccagacactatcagcagaggttcgctgtgattctggaagcctatctgaggggctgtggcacagccatgctgcacgactttacccaacaagtccaagtaatcgagatgttacaaaaagtcacccttgatattaaatcgctctctgctgaaaagtatgacgtcagttcccaagttatttcacaacttaaacaaaagcttgaaaacctgcagaattctcaactccccgaaagctttagagttccatatgatcctggactgaaagcaggagcgctggcaattgaaaaatgtaaagtaatggcctccaagaaaaaaccactatggcttgagtttaaatgtgccgatcctacagccctatcaaatgaaacaattggaattatctttaaacatggtgatgatctgcgccaagacatgcttattttacagattctacgaatcatggagtctatttgggagactgaatctttggatctatgcctcctgccatatggttgcatttcaactggtgacaaaataggaatgatcgagattgtgaaagacgccacgacaattgccaaaattcagcaaagcacagtgggcaacacgggagcatttaaagatgaagtcctgaatcactggctcaaagaaaaatcccctactgaagaaaagtttcaggcagcagtggagagatttgtttattcctgtgcaggctactgtgtggcaacctttgttcttggaataggcgacagacacaatgacaatattatgatcaccgagacaggaaacctatttcatattgacttcgggcacattcttgggaattacaaaagtttcctgggcattaataaagagagagtgccatttgtgctaacccctgacttcctctttgtgatgggaacttctggaaagaagacaagcccacacttccagaaatttcaggacatctgtgttaaggcttatctagcccttcgtcatcacacaaacctactgatcatcctgttctccatgatgctgatgacaggaatgccccagttaacaagcaaagaagacattgaatatatccgggatgccctcacagtggggaaaaatgaggaggatgctaaaaagtattttcttgatcagatcgaagtttgcagagacaaaggatggactgtgcagtttaattggtttctacatcttgttcttggcatcaaacaaggagagaaacattcagcctaatactttaggctagaatcaaaaacaagttagtgttctatggtttaaattagcatagcaatcatcgaacttggatttcaaatgcaatagacattgtgaaagctggcatttcagaagtatagctcttttcctacctgaactcttccctggagaaaagatgttggcattgctgattgtttggttaagcaatgtccagtgctaggattatttgcaggtttggttttttctcatttgtctgtggcattggagaatattctcggtttaaacagactaatgacttccttattgtccctgatattttgactatcttactattgagtgcttctggaaattctttggaataattgatgacatctattttcatctgggtttagtctcaattttggttatctttgtgttcctcaagctctttaaagaaaaagatgtaatcgttgtaacctttgtctcattccttaaatgatgcttccaaacatctccttagtgtctgcaggtgttagtggtgtgctaaaagcaaggaaagcgagttagtcttttcagtgtcttttgcaattcaattcttttgtcatgtataactgagacacacaaacacagcaggagaaatctaaaccgttgtgccttgaccttcctctgctggtcttgttccagggttatgaatatgaaaaaatagagatgagactttttgtgtcaactctgtccacaagagtgagttatctagtatgattagtatagctttctccagcatggcagcaggaagtaactacagggcctcttttatgcctgacatttcttcccttcctttttccctgcctccctttttcatcaattgcgatgctcccacaactctttacagacttgtgaaatcttcaagaacacctttactctataactcaaaaattagttgaaaaataattacttctcaaggattattagaatcttaggtacttatttgtaaagatgtttagtgacttttttttcaagtatcttattaaaggaggcattctagaaaatatgaattagtttccaaatgccttaattttaaactttggcctgaacagttttttctttttcttaatggaagaagatatttaatatcttaaaaatattccaagttaggaagaacactacttgccttatccatttcccatttaaaggacttttaaactttgacacatccttcagatttcctgaaaataattgaaatatcttactttaaaaatattttcatctctgaaatatctcgttatttattggaggtattgtttaaccttagagagaccattaaattatttataaaatattttgtaattacctgtagctaatacattacatagaaaaaaactatgttaacagtgtctctgtttaagtataatcagatataaatatatacttaattttttaattttaaaaatagatacctgtttgactttgaggtagtccagaccttttctttttttttttttttttaatgtgtgcaaaagcccaaaggttcctaagcctggctgcaaagaagaatcaacagggacactttttaaaaacactcttatcagcctgggcaacacagtgagactccatctcttaaaaaaaaaattagctgggtatagtggtatgtgcctgtagtcccaggtactcaggaggctgaggcaggaggattgcctgagcccaggaggtggaaactgcagagagtcatgatcatgtccttacactccagcctggataacagagcgagaccctgtctcaaaaaaataaaataaaaaataaaaacacccttgcctgcgctccattcccaggttataatttaattactgtgggatgagacccagacatcaatatttttctagattcttcaggtgattctaattcacagccagagttggaagccctgcgtggcctttgaaggtctagatgattcttcttccttgccctttgagcttttccccatctcacaggtatctagaaaaaaactcctcttctttggcaacctgtccttttaaaatcacactctacccacctgtacagaagaccatgccctataatgaaatgtttattcctatctataaatggaggataaacattttgtggcacttctggaccaactattccctactattcttttgaagaaaggcaggaagagtactttctaattcagaagaggatgttttcactattctgataaacaatagccaagttcagaccttgtacagattctttttatttgaattgctgaaataatttattgatgatgaaaaaaagattagagaggaatacatttatatttagcttattggcacatgtgcatacatatttcctcttcaaatgaaccagttctttcatttcattatgctaatatatatatataacatatatatgctaatatatatataacatatatatgctaatatatatatatcacacatatatatcacagttttatatatatatatgtatgtgtgtgtgtatatatatatatatatatcacagttgggcttgattcttccgtattccaaagagcataatttcagttctatagacttatagataaataaaaatcatctttgtgggcttccttcctttactgttcgcagtgaattacatgacgaacaacttctatacctttgaaaatgttctagaactagaatcatcctgctactgggaactacccacagctctatcttcaatgccaggtgaaaacacagatcacaagtcagatgaatcaggccaaagcaacttttatgtatatctaggactggcgacataatttgcagagcccagtgaacagtgaaaatgcagtcccatcattcaaaaattattaagaaattcgagatggcaacagcagttgtcacaccaagcacagtgcccttctgagcatgaggctctgtgtgactgcatgggtccatgagaccagcactgtgtgggtctgaatgatggctttggtgttcagtttagcacacgcggtctaccacgtctgcatgagtggtaaatgtagtgcctgggtcaaaatgttccttctgttcaaatcgaaatacctcatctctatggctctatggctgtacattaggacctagaacagtggcccattgctcttagactggaaccatgtccactaaaataaacctaagcagatgttgtagacctagccccacaggactgcatttagctgcttcagtgacactttgatgaaagtatggagaagtggagacattatagataaaatatatcaattcccagagaaaactcttgacttaaaaacttaactgtagtaaatatatctttttcaggtgatgaattatttttttaaaaaaggttacatataggaattctgcagtataatttggaggctattagtgctatattaatggaaattaattattttttaagtaagtccaaaaaataatctagaaagtaagtttccagagcaaatctgacctagcatttggtatgctaggctctgcttttcatgattttgaaataaatcataattagacttaacaatatggagaaaataaacttgtatttttaagtgttctgttggcttattttctgtttcatccaactcaataattctgataaataaatttggttctagtttggtgcttgaaaaaaaa

SEQ ID NO: 92 - protein, 1102 aa, Homo sapiens
MELENYKQPVVLREDNCRRRRRMKPRSAAASLSSMELIPIEFVLPTSQRKCKSPETALLHVAGHGNVEQMKAQVWLRALETSVAADFYHRLGPHHFLLLYQKKGQWYEIYDKYQVVQTLDCLRYWKATHRSPGQIHLVQRHPPSEESQAFQRQLTALIGYDVTDVSNVHDDELEFTRRGLVTPRMAEVASRDPKLYAMHPWVTSKPLPEYLWKKIANNCIFIVIHRSTTSQTIKVSPDDTPGAILQSFFTKMAKKKSLMDIPESQSEQDFVLRVCGRDEYLVGETPIKNFQWVRHCLKNGEEIHVVLDTPPDPALDEVRKEEWPLVDDCTGVTGYHEQLTIHGKDHESVFTVSLWDCDRKFRVKIRGIDIPVLPRNTDLTVFVEANIQHGQQVLCQRRTSPKPFTEEVLWNVWLEFSIKIKDLPKGALLNLQIYCGKAPALSSKASAESPSSESKGKVQLLYYVNLLLIDHRFLLRRGEYVLHMWQISGKGEDQGSFNADKLTSATNPDKENSMSISILLDNYCHPIALPKHQPTPDPEGDRVRAEMPNQLRKQLEAIIATDPLNPLTAEDKELLWHFRYESLKHPKAYPKLFSSVKWGQQEIVAKTYQLLARREVWDQSALDVGLTMQLLDCNFSDENVRAIAVQKLESLEDDDVLHYLLQLVQAVKFEPYHDSALARFLLKRGLRNKRIGHFLFWFLRSEIAQSRHYQQRFAVILEAYLRGCGTAMLHDFTQQVQVIEMLQKVTLDIKSLSAEKYDVSSQVISQLKQKLENLQNSQLPESFRVPYDPGLKAGALAIEKCKVMASKKKPLWLEFKCADPTALSNETIGIIFKHGDDLRQDMLILQILRIMESIWETESLDLCLLPYGCISTGDKIGMIEIVKDATTIAKIQQSTVGNTGAFKDEVLNHWLKEKSPTEEKFQAAVERFVYSCAGYCVATFVLGIGDRHNDNIMITETGNLFHIDFGHILGNYKSFLGINKERVPFVLTPDFLFVMGTSGKKTSPHFQKFQDICVKAYLALRHHTNLLIILFSMMLMTGMPQLTSKEDIEYIRDALTVGKNEEDAKKYFLDQIEVCRDKGWTVQFNWFLHLVLGIKQGEKHSA

SEQ ID NO: 93 - DNA, 2398 bp, Homo sapiens
  CDS (242)..(877)
gggaggccggatgtgagtggagcggccatttcctgtttctctgcagttttcctcagctttgggtggtggccgctgccgggcatcggcttccagtccgcggagggcgaggcggcgtggacagcggccccggcacccagcgccccgccgcccgcaagccgcgcgcccgtccgccgcgccccgagcccgccgcttcctatctcagcgccctgccgccgccgccgcggcccagcgagcggccctgatgcaggccatcaagtgtgtggtggtgggagacggagctgtaggtaaaacttgcctactgatcagttacacaaccaatgcatttcctggagaatatatccctactgtctttgacaattattctgccaatgttatggtagatggaaaaccggtgaatctgggcttatgggatacagctggacaagaagattatgacagattacgccccctatcctatccgcaaacagttggagaaacgtacggtaaggatataacctcccggggcaaagacaagccgattgccgatgtgttcttaatttgcttttcccttgtgagtcctgcatcatttgaaaatgtccgtgcaaagtggtatcctgaggtgcggcaccactgtcccaacactcccatcatcctagtgggaactaaacttgatcttagggatgataaagacacgatcgagaaactgaaggagaagaagctgactcccatcacctatccgcagggtctagccatggctaaggagattggtgctgtaaaatacctggagtgctcggcgctcacacagcgaggcctcaagacagtgtttgacgaagcgatccgagcagtcctctgcccgcctcccgtgaagaagaggaagagaaaatgcctgctgttgtaaatgtctcagcccctcgttcttggtcctgtcccttggaacctttgtacgctttgctcaaaaaaaaacaaaaaaaaaaaacaaaaaaaaaaaacaacggtggagccttcgcactcaatgccaactttttgttacagattaatttttccataaaaccattttttgaaccaatcagtaattttaaggttttgtttgttctaaatgtaagagttcagactcacattctattaaaatttagccctaaaatgacaagccttcttaaagccttatttttcaaaagcgccccccccattcttgttcagattaagagttgccaaaataccttctgaactacactgcattgttgtgccgagaacaccgagcactgaactttgcaaagaccttcgtctttgagaagacggtagcttctgcagttaggaggtgcagacacttgctctcctatgtagttctcagatgcgtaaagcagaacagcctcccgaatgaagcgttgccattgaactcaccagtgagttagcagcacgtgttcccgacataacattgtactgtaatggagtgagcgtagcagctcagctctttggatcagtctttgtgatttcatagcgagttttctgaccagcttttgcggagattttgaacagaactgctatttcctctaatgaagaattctgtttagctgtgggtgtgccgggtggggtgtgtgtgatcaaaggacaaagacagtattttgacaaaatacgaagtggagatttacactacattgtacaaggaatgaaagtgtcacgggtaaaaactctaaaaggttaatttctgtcaaatgcagtagatgatgaaagaaaggttggtattatcaggaaatgttttcttaagcttttcctttctcttacacctgccatgcctccccaaattgggcatttaattcatctttaaactggttgttctgttagtcgctaacttagtaagtgcttttcttatagaaccccttctgactgagcaatatgcctccttgtattataaaatctttctgataatgcattagaaggtttttttgtcgattagtaaaagtgctttccatgttactttattcagagctaataagtgctttccttagttttctagtaactaggtgtaaaaatcatgtgttgcagctttatagtttttaaaatattttagataattcttaaactatgaaccttcttaacatcactgtcttgccagattaccgacactgtcacttgaccaatactgaccctctttacctcgcccacgcggacacacgcctcctgtagtcgctttgcctattgatgttcctttgggtctgtgaggttctgtaaactgtgctagtgctgacgatgttctgtacaacttaactcactggcgagaatacagcgtgggacccttcagccactacaacagaattttttaaattgacagttgcagaattgtggagtgtttttacattgatcttttgctaatgcaattagcattatgttttgcatgtatgacttaataaatccttgaatcata

SEQ ID NO: 94 - protein, 211 aa, Homo sapiens
MQAIKCVVVGDGAVGKTCLLISYTTNAFPGEYIPTVFDNYSANVMVDGKPVNLGLWDTAGQEDYDRLRPLSYPQTVGETYGKDITSRGKDKPIADVFLICFSLVSPASFENVRAKWYPEVRHHCPNTPIILVGTKLDLRDDKDTIEKLKEKKLTPITYPQGLAMAKEIGAVKYLECSALTQRGLKTVFDEAIRAVLCPPPVKKRKRKCLLL

SEQ ID NO: 95 - DNA, 1734 bp, Homo sapiens
  CDS (113)..(1510)
gctgagtcatcactagagagtgggaagggcagcagcagcagagaatccaaaccctaaagctgatatcacaaagtaccatttctccaagttgggggctcagaggggagtcatcatgagcgatgttaccattgtgaaagaaggttgggttcagaagaggggagaatatataaaaaactggaggccaagatacttccttttgaagacagatggctcattcataggatataaagagaaacctcaagatgtggatttaccttatcccctcaacaacttttcagtggcaaaatgccagttaatgaaaacagaacgaccaaagccaaacacatttataatcagatgtctccagtggactactgttatagagagaacatttcatgtagatactccagaggaaagggaagaatggacagaagctatccaggctgtagcagacagactgcagaggcaagaagaggagagaatgaattgtagtccaacttcacaaattgataatataggagaggaagagatggatgcctctacaacccatcataaaagaaagacaatgaatgattttgactatttgaaactactaggtaaaggcacttttgggaaagttattttggttcgagagaaggcaagtggaaaatactatgctatgaagattctgaagaaagaagtcattattgcaaaggatgaagtggcacacactctaactgaaagcagagtattaaagaacactagacatccctttttaacatccttgaaatattccttccagacaaaagaccgtttgtgttttgtgatggaatatgttaatgggggcgagctgtttttccatttgtcgagagagcgggtgttctctgaggaccgcacacgtttctatggtgcagaaattgtctctgccttggactatctacattccggaaagattgtgtaccgtgatctcaagttggagaatctaatgctggacaaagatggccacataaaaattacagattttggactttgcaaagaagggatcacagatgcagccaccatgaagacattctgtggcactccagaatatctggcaccagaggtgttagaagataatgactatggccgagcagtagactggtggggcctaggggttgtcatgtatgaaatgatgtgtgggaggttacctttctacaaccaggaccatgagaaactttttgaattaatattaatggaagacattaaatttcctcgaacactctcttcagatgcaaaatcattgctttcagggctcttgataaaggatccaaataaacgccttggtggaggaccagatgatgcaaaagaaattatgagacacagtttcttctctggagtaaactggcaagatgtatatgataaaaagcttgtacctccttttaaacctcaagtaacatctgagacagatactagatattttgatgaagaatttacagctcagactattacaataacaccacctgaaaaatgtcagcaatcagattgtggcatgctgggtaactggaaaaaataataaaaatcggcttcctacagccagcagcacagtcacccatggaactgttggctttggattaaatgtggaattgaacgactacccagaagtgttctggaaagaagcgagatgtgtggcctgcctcaccgtcctcacccatcaaaagcaccagcaggcacgttaactcgaattctcacaaggaaaaggccattaaagctcaaggtgcatttcaaactccaggctac

SEQ ID NO: 96 - protein, 465 aa, Homo sapiens
MSDVTIVKEGWVQKRGEYIKNWRPRYFLLKTDGSFIGYKEKPQDVDLPYPLNNFSVAKCQLMKTERPKPNTFIIRCLQWTTVIERTFHVDTPEEREEWTEAIQAVADRLQRQEEERMNCSPTSQIDNIGEEEMDASTTHHKRKTMNDFDYLKLLGKGTFGKVILVREKASGKYYAMKILKKEVIIAKDEVAHTLTESRVLKNTRHPFLTSLKYSFQTKDRLCFVMEYVNGGELFFHLSRERVFSEDRTRFYGAEIVSALDYLHSGKIVYRDLKLENLMLDKDGHIKITDFGLCKEGITDAATMKTFCGTPEYLAPEVLEDNDYGRAVDWWGLGVVMYEMMCGRLPFYNQDHEKLFELILMEDIKFPRTLSSDAKSLLSGLLIKDPNKRLGGGPDDAKEIMRHSFFSGVNWQDVYDKKLVPPFKPQVTSETDTRYFDEEFTAQTITITPPEKCQQSDCGMLGNWKK

SEQ ID NO: 97 - DNA, 4076 bp, Homo sapiens
  CDS (227)..(2077)
aacccaggccccgcccctttggccacatgtcgcgcatgtcttcccgtcggacggcgtgccacctcgccgcgcagctttacgaacctagagcagcgccgccccgcctcctgtctccgtcctcacctccccgccccctcccagcttcgcgtctcctagctcgacgcgcccgctataatcacgtgattgcctcatccgggtcttttgcgttctctttccctctcccaacatggcggcctcagcaaaaaagaagaataagaaggggaagactatctccctaacagactttctggctgaggatgggggtactggtggaggaagcacctatgtttccaaaccagtcagctgggctgatgaaacggatgacctggaaggagatgtttcgaccacttggcacagtaacgatgacgatgtgtatagggcgcctccaattgaccgttccatccttcccactgctccacgggctgctcgggaacccaatatcgaccggagccgtcttcccaaatcgccaccctacactgcttttctaggaaacctaccctatgatgttacagaagagtcaattaaggaattctttcgaggattaaatatcagtgcagtgcgtttaccacgtgaacccagcaatccagagaggttgaaaggttttggttatgctgaatttgaggacctggattccctgctcagtgccctgagtctcaatgaagagtctctaggtaacaggagaattcgagtggacgttgctgatcaagcacaggataaagacagggatgatcgttcttttggccgtgatagaaatcgggattctgacaaaacagatacagactggagggctcgtcctgctacagacagctttgatgactacccacctagaagaggtgatgatagctttggagacaagtatcgagatcgttatgattcagaccggtatcgggatgggtatcgggatgggtatcgggatggcccacgccgggatatggatcgatatggtggccgggatcgctatgatgaccgaggcagcagagactatgatagaggctatgattcccggataggcagtggcagaagagcatttggcagtgggtatcgcagggatgatgactacagaggaggcggggaccgctatgaagaccgatatgacagacgggatgatcggtcgtggagctccagagatgattactctcgggatgattataggcgtgatgatagaggtcccccccaaagacccaaactgaatctaaagcctcggagtactcctaaggaagatgattcctctgctagtacctcccagtccactcgagctgcttctatctttggaggggcaaagcctgttgacacagctgctagagaaagagaagtagaagaacggctacagaaggaacaagagaagttgcagcgtcagctggatgagccaaaactagaacgacggcctcgggagagacacccaagctggcgaagtgaagaaactcaggaacgggaacggtcgaggacaggaagtgagtcatcacaaactgggacctccaccacatctagcagaagtaagtcagaccaggatgcacgaaggagagagagtgagaagtctctagaaaatgaaacactcaataaggaggaagattgccactctccaacttctaaacctcccaaacctgatcagcccctaaaggtaatgccagcccctccaccaaaggagaatgcttgggtgaagcgaagttctaaccctcctgctcgatctcagagctcagacacagagcagcagtcccctacaagtggtgggggaaaagtagctccagctcaaccatctgaggaaggaccaggaaggaaagatgaaaataaagtagatgggatgaatgccccaaaaggccaaactgggaactctagccgtggtccaggagacggagggaacagagaccactggaaggagtcagataggaaagatggcaaaaaggatcaagactccagatctgcacctgagccaaagaaacctgaggaaaatccagcttccaagttcagttctgcaagcaagtatgctgctctctctgttgatggtgaagatgaaaatgagggagaagattatgccgaatagacctctacatcctgtgcttttctcctagtttctctccaccctggaacattcgagagcaaatcaaaacctctatccagacaagacaaaataaaactcaccatctcctgaagacctttcttacctttttttaaaaacaaaaaatgaaattattttgcatgctgctgcagcctttaaagtattgaagtaactggagaattgccaatacagccagagagaaagggactacagctttttagaggaaaagttgtggtgcgttatgtcaccatgcagttgccagtgtgattagtgcctaggggtctccatttagcagaaatggtaatgacagtgatataatgcctggaacctggttgggcagtaggggagggaggtagaaggaaaagtgtgagatttctaccttttagtttttatcctattgtggcatatatgaattctcaaacattatctgaataaattttccactcttggaaaggtagatttagcctcaagttgttctagtctccaggaggctgccagcccctcctcttatttaattctgagttttgggggccagcctagagggaattccttttttttttttaaccccccaggggggtagttgggagtgagactataggccataaagaatgggactgcattggaccaaaataaatgggaaaatcgtggtttgaaaagaagcttttgggaagtgatgagtcattttgcaccaggtaataggggaaaattgtgtgacctccagcaaacacatgaatggttatttcctggagccggaagcacttgggggtcgtggtaattcccagtgttttctgtgtcctagttttaccctttctaaacactgtcctttttgaaagttttgaatatatccacattctattgaaaccttgaaactaaaaatttagactcttatcatcatcttaagttcttcatgctactcttaacctcccaaaaagcagtatctaagtcacatacatgatgtcttgggcattttctcagccatggagaactctgaaaggaagaatcgctgcttttctcaagcaaatcggtttcttgatgtcttttggttctccttgcctgctcctgatgcttggaccccttttattgatcagagtgctctagaataatggatggtcttggatgatggataaatagggacagggacagttaaattgggagcctttcttacaaccttgatgggatttttccccccaagtttccttctccactgaaatgccacactaatgcttgttggattcatgaggtggccagaccaatgtgttgttttgttgttgtttttttaagcttcccttgagagaataaatggtaatggagagaactatttaacaaggtcctggtttctcttgcaacacagtagctaaacttgcctgcttttatatgcatttttgtagggatcagcttggtagacagtattagcggagaaacaccttgatcttggtttgcaagcccttctcccatcagtcctagattaggccctgttcagccatgcaggggtgttggtttatgcgtgctgcagcagtgggcataatgaatataatttacccagtggacaaaggtgtgtaccaagtgaatttaaataattggtgtggattggccagtagctaagaagtgggcttttaaagagtattgaagattgaaagggtttttctttcttttttaaaaaagaaaaacaaactattgattgtagataatgaaaagctagggtttgccctcttcatgtctactctccttccaaatagttatatccaaaactgtttttccctctcccctaccttgtcccccctattaaaatagaaacagggattgattaatgtcccgctcctgaatacatgtaaaatttgtacaaaaatatcttctatgaaaatgatttgtaatctgtagacttattacctgggagatgtcttgatgtaaaatcccatcctttgggttgtgggttttttgttttctccaaataaatctgatctttaaagttcaaaaaaaaaaaaaa

SEQ ID NO: 98 - protein, 616 aa, Homo sapiens
MAASAKKKNKKGKTISLTDFLAEDGGTGGGSTYVSKPVSWADETDDLEGDVSTTWHSNDDDVYRAPPIDRSILPTAPRAAREPNIDRSRLPKSPPYTAFLGNLPYDVTEESIKEFFRGLNISAVRLPREPSNPERLKGFGYAEFEDLDSLLSALSLNEESLGNRRIRVDVADQAQDKDRDDRSFGRDRNRDSDKTDTDWRARPATDSFDDYPPRRGDDSFGDKYRDRYDSDRYRDGYRDGYRDGPRRDMDRYGGRDRYDDRGSRDYDRGYDSRIGSGRRAFGSGYRRDDDYRGGGDRYEDRYDRRDDRSWSSRDDYSRDDYRRDDRGPPQRPKLNLKPRSTPKEDDSSASTSQSTRAASIFGGAKPVDTAAREREVEERLQKEQEKLQRQLDEPKLERRPRERHPSWRSEETQERERSRTGSESSQTGTSTTSSRSKSDQDARRRESEKSLENETLNKEEDCHSPTSKPPKPDQPLKVMPAPPPKENAWVKRSSNPPARSQSSDTEQQSPTSGGGKVAPAQPSEEGPGRKDENKVDGMNAPKGQTGNSSRGPGDGGNRDHWKESDRKDGKKDQDSRSAPEPKKPEENPASKFSSASKYAALSVDGEDENEGEDYAE

SEQ ID NO: 99 - DNA, 4749 bp, Homo sapiens
  CDS (1524)..(2177)
gcacaggcagcctgcatacactccttttcctggtgtcaacattatttaaaagcatgggaaatagtaatgagacagtgtcttcttcattagaaccttaggagtctactagatttcttcatctctatttgttgttattagtagccaaactgtgcaaaaaacacggtcttgagaaatgacagcacagtatcttagagggaaaggaaatgtaggatgccagtgtggggacaaatttctgattgccagtgattgttgtgagcataacaataatttcatgaacattaaagcctctattgagggcagctgcagttgtaaaggaaaaaaaatggtcctgaacatttaaaactacactggtgtacatcataatcaaacaaagtaaacagaaaaaaatttaaactttgctaaaaaaaaaaagcagaagcacttgatctttaggaaggcacgcagttgcttattatgaatcatttctagagtccgatgcattttcaaagccggttacagtcattacgaagcacacccttgtgaggtaagtgtatcatcacctttggttcataaataaaaaagctgagacgccgagcgattaagtcactcgcctaaggagaatgagtcaacgtcaagagtcatagttgacccggcctaaagactccagaccatcagtccagggcttagtcagcggggcccggagtggcttccctggctggcatctggacttaggctatttccgtgcacgtaaaagcggaatattggaacggttgcacagaacttccaaataatttttaccgccacgcaagatttagccctgaggtcttaatctcaggatttgggacagtaaaagctgtcgtccctccccctcgtccagccggtggcaagcgggtactgcgggcggttccgtccgtcccctttcgcagaaatggcaacgaatgaccaccagcattagctgagccaggggacgtgggagggttgattgcctaaacgactctgcatcgccgcctctttttgaaactaagagaaaatggtgggagatcaaaagaaaactaaataaacacacaggcaacttgtcctgggacctcaactaagcaaatgaagccttattgtgtgtgctgagcctgcagttcccaaccttccggggaagatgggaggacagggcgacaaagggcacagtaggcttgcctggcagtaagtgtgaccgcagctatccaggcggaagagcagaggactgaaaccaccctccagcaagcgagtgtccgccgcgttgagaaccgcgcaccctacccatcggccacgtgaccagtcctttttaaaaaaaatttctttaccttaaaaaaaaaaaaaaaaaaaaggtgggggagagactccacttcccagaagcctctcgttactcacgcagccgcagtcttgcgcaggtgccgccagggccaaacggacatatccgtcacgtggccagaagctggccaatccggtttgaatctcatttttttcctcttacccccccttctggagcggttgtgcgatcagatcgatctaagatggcgactgtcgaaccggaaaccacccctactcctaatcccccgactacagaagaggagaaaacggaatctaatcaggaggttgctaacccagaacactatattaaacatcccctacagaacagatgggcactctggttttttaaaaatgataaaagcaaaacttggcaagcaaacctgcggctgatctccaagtttgatactgttgaagacttttgggctctgtacaaccatatccagttgtctagtaatttaatgcctggctgtgactactcactttttaaggatggtattgagcctatgtgggaagatgagaaaaacaaacggggaggacgatggctaattacattgaacaaacagcagagacgaagtgacctcgatcgcttttggctagagacacttctgtgccttattggagaatcttttgatgactacagtgatgatgtatgtggcgctgttgttaatgttagagctaaaggtgataagatagcaatatggactactgaatgtgaaaacagagaagctgttacacatatagggagggtatacaaggaaaggttaggacttcctccaaagatagtgattggttatcagtcccacgcagacacagctactaagagcggctccaccactaaaaataggtttgttgtttaagaagacaccttctgagtattctcataggagactgcgtcaagcaatcgagatttgggagctgaaccaaagcctcttcaaaaagcagagtggactgcatttaaatttgatttccatcttaatgttactcagatataagagaagtctcattcgcctttgtcttgtacttctgtgttcatttttttttttttttttggctagagtttccactatcccaatcaaagaattacagtacacatccccagaatccataaatgtgttcctggcccactctgtaatagttcagtagaattaccattaattacatacagattttacctatccacaatagtcagaaaacaacttggcatttctatactttacaggaaaaaaaattctgttgttccattttatgcagaagcatattttgctggtttgaaagattatgatgcatacagttttctagcaattttctttgtttctttttacagcattgtctttgctgtactcttgctgatggctgctagattttaatttatttgtttccctacttgataatattagtgattctgatttcagtttttcatttgttttgcttttgtttttttcctcatgtaacattggtgaaggatccaggaatatgacacaaaggtggaataaacattaattttgtgcattctttggtaattttttttgttttttgtaactacaaagctttgctacaaatttatgcatttcattcaaatcagtgatctatgtttgtgtgatttcctaaacataattgtggattataaaaaatgtaacatcataattacattcctaactagaattagtatgtctgtttttgtatctttatgctgtattttaacactttgtattacttaggttattttgctttggttaaaaatggctcaagtagaaaagcagtcccattcatattaagacagtgtacaaaactgtaaataaaatgtgtacagtgaattgtcttttagacaactagatttgtccttttatttctccatctttatagaaggaatttgtacttcttattgcaaggcagtctctatattatgtcttcttttgtggtgtcttccatgtgaacagcataagtttggagcactagtttgattattatgtttattacaatttttaataaattgaataggtagtatcatatatatggaattaaattgatgtggctatctttgtttttttataaagtaaggcacagtcattcagtcttaggtaaataatgtactctcttaatatgttaatactcatgagaattgggatctgatgcatcaccatttgattggtagcaacagtggttgtaaaacttggttgctgaattgagttgtttctatgttaagtgtcaaaatgatagtgtagggaaagtacaggtggtggggacatatgcattaagaatcttgttagtgttgcaatctaaatagaatggaataaacaggtgttaagacatatttatagtggtaaattgttgtagtatggtattctgtaaacttgaaaacttgatctactctttgtaggtatcatttgaaagcaaacttgaaaatgttttgtacatagtacatacttgtatagtcctgtgagatgaagtatggctatcagaccaaaggataagccaaactgtaggtagcagaatggaaattattattttgagaggaaaatttgtctttgaatggtgattatgacttaatcattttaaaactgataaacttgacaaaaaccctgtatgaaataaacatgaaattaatagcactgatttcattgtaaaattttaaagcagtttaaagggtaccacaggttatcacagtactctcaatgccacaaacacctcttgttcagtattctagaaatactgaatcagaattctgtgtttattataatctcagcatactgtacataatatctgctagttaaacttgggtaattggttaaggtgacttactgtctatgtcaatatgtatagttttgagtacttcaagagtttacttaaaagtgatgatgttactggtatgttggcagtgggtgggactgaagtagtgtatctattataaattgatctattttcttaattctaagatgaagtccaattttaagcatcagcttttaggtgcaaaggaggaattaacacattaaatgtatacagttctaaatttttgaaataactgatgtgtagcatttgattattggtattaccattttagaatcatgatgttattttaaacctttttcctggggacaagaaaggataataaattacgctgaatcacttttggcagttgccacttaaatagtacagtgacttgcaacttttataactttatcagcatcttctctaaatacaaaattaggctatatgttattttccaacttactgttttctctctgtttagcaggatattataaatagattaaatagatatattttctttttttttttttttttttgagacggagtctcgctttgtctcccaggctggagtgcagtggcgtgatctcccagtagctgggactacaagcacctgccaccatgcccggctaattttttttgtatttttagtagagacggggtttc

SEQ ID NO: 100 - protein, 217 aa, Homo sapiens [sequence omitted]

SEQ ID NO: 101 - DNA, 1843 bp, Homo sapiens
  CDS (208)..(1566)
agggacggaggcccgcgctgcccaagagcgccacgggcggggcggggccggcggcgggctgcgggcgcggccggacgggagttccccggagaaggatcctgcagcccgagtcccgaggataaagcttggggttcatcctccttccctggatcactccacagtcctcaggcttccccaatccaggggactcggcgccgggacgctgctatggacgacattttcactcagtgccgggagggcaacgcagtcgccgttcgcctgtggctggacaacacggagaacgacctcaaccagggggacgatcatggcttctcccccttgcactgggcctgccgagagggccgctctgctgtggttgagatgttgatcatgcggggggcacggatcaatgtaatgaaccgtggggatgacacccccctgcatctggcagccagtcatggacaccgtgatattgtacagaagctattgcagtacaaggcagacatcaatgcagtgaatgaacacgggaatgtgcccctgcactatgcctgtttttggggccaagatcaagtggcagaggacctggtggcaaatggggcccttgtcagcatctgtaacaagtatggagagatgcctgtggacaaagccaaggcacccctgagagagcttctccgagagcgggcagagaagatgggccagaatctcaaccgtattccatacaaggacacattctggaaggggaccacccgcactcggccccgaaatggaaccctgaacaaacactctggcattgacttcaaacagcttaacttcctgacgaagctcaacgagaatcactctggagagctatggaagggccgctggcagggcaatgacattgtcgtgaaggtgctgaaggttcgagactggagtacaaggaagagcagggacttcaatgaagagtgtccccggctcaggattttctcgcatccaaatgtgctcccagtgctaggtgcctgccagtctccacctgctcctcatcctactctcatcacacactggatgccgtatggatccctctacaatgtactacatgaaggcaccaatttcgtcgtggaccagagccaggctgtgaagtttgctttggacatggcaaggggcatggccttcctacacacactagagcccctcatcccacgacatgcactcaatagccgtagtgtaatgattgatgaggacatgactgcccgaattagcatggctgatgtcaagttctctttccaatgtcctggtcgcatgtatgcacctgcctgggtagcccccgaagctctgcagaagaagcctgaagacacaaacagacgctcagcagacatgtggagttttgcagtgcttctgtgggaactggtgacacgggaggtaccctttgctgacctctccaatatggagattggaatgaaggtggcattggaaggccttcggcctaccatcccaccaggtatttcccctcatgtgtgtaagctcatgaagatctgcatgaatgaagaccctgcaaagcgacccaaatttgacatgattgtgcctatccttgagaagatgcaggacaagtaggactggaaggtccttgcctgaactccagaggtgtcgggacatggttgggggaatgcacctccccaaagcagcaggcctctggttgcctcccccgcctccagtcatggtactaccccagccatggggtccatccccttcccccatccctaccactgtggccccaagaggggcgggctcagagctttgtcacttgccacatggtgtctcccaacatgggagggatcagccccgcctgtcacaataaagtttattatgaaaacaggaaaaaaaaaaaaaa

SEQ ID NO: 102 - protein, 452 aa, Homo sapiens
MDDIFTQCREGNAVAVRLWLDNTENDLNQGDDHGFSPLHWACREGRSAVVEMLIMRGARINVMNRGDDTPLHLAASHGHRDIVQKLLQYKADINAVNEHGNVPLHYACFWGQDQVAEDLVANGALVSICNKYGEMPVDKAKAPLRELLRERAEKMGQNLNRIPYKDTFWKGTTRTRPRNGTLNKHSGIDFKQLNFLTKLNENHSGELWKGRWQGNDIVVKVLKVRDWSTRKSRDFNEECPRLRIFSHPNVLPVLGACQSPPAPHPTLITHWMPYGSLYNVLHEGTNFVVDQSQAVKFALDMARGMAFLHTLEPLIPRHALNSRSVMIDEDMTARISMADVKFSFQCPGRMYAPAWVAPEALQKKPEDTNRRSADMWSFAVLLWELVTREVPFADLSNMEIGMKVALEGLRPTIPPGISPHVCKLMKICMNEDPAKRPKFDMIVPILEKMQDK

SEQ ID NO: 103 - DNA, 2329 bp, Homo sapiens
  CDS (627)..(950)
cagcacctgggaaacgcccgcgcggtttggggcaggcgtggccgtcggggcggagggcggtggccggccgcggtccgggcgtcaggccgggcggcgggggcggcagggaggcggcgctctggggccgcaggcggacgtactctgtgagcggcgcccgggcgcctgggcaggcgcctcccgagtaccggcgcccattttgcccgcccgctaaggagacccgtgcgcggcctacacgcttgggggacagccctttaagacgacatctccgcgaacgccggcctcttgagccagggggacgctcttttgaaagtcagtcccaaaacagttaaggttttattttattttgttttatttccaagtcacagcccccgaatctcgtacaactctccctggaccacttccggttgccggcccgcgcctcataacttcggttcgagtgacctcggcccgggatgcccctcggctcaccccgggctcacgtcgcgatcctggcttgagtggcccagggtgggagacctggaagttttagcctagctgttctcaaggcggattaattagcccaagaaacattatattcatgcttaggtggagaaaagcagggctagaattggaacccaaagcccagaatggcaggagaggatgtgggggctccacccgatcacctctgggttcaccaagagggtatctaccgcgacgaataccagcgcacgtgggtggccgtcgtggaagaggagacgagtttcctaagggcacgagtccagcaaattcaggttcccttaggtgacgcagctaggccaagtcaccttcttacctcccagctacctctcatgtggcaactctacccggaggagcgctacatggataacaactctcgcttgtggcagatacagcatcatttaatggtcaggggagtacaggagctgttgcttaagcttttgcctgatgactaacctggtgctgggattctacgaagatatgctcctttgttctgttcagtatttggcaatcacttcatccactactgcagtgcacccacccttgggcctggggggagggagtgggttgaaaaactgctcaagaaacagaagtttagcaagggtcatgaagaatactgcaagtgaaactgcagagagaggttacgtaggcagaaagcaagtcaacaaaagcacttagtcaggatccgtaacttgaaattgactcctttggaaattgccatagaacccttaatggacatcatcggctggacctgggatctgatgaatcccacaaaagtcagcaccttctacagaacagatgccctgatcaccaaggacttggtactgatttagagagaagagagcagctcctagcagcatcaacatctatttgtcgcttatttgccctgcagcaattcacctgcctttccttctcccatcctgtaaatatcctaggttttgctccagtgtttcccatcccagtactgacctaatttggatctgctgagtatttagagggctctgaaaagagatatgcattgatgaaattagctacaaaggcttgtgggcctttttttctatctgaaatcgtgtcttcaaattactggaagttgctgatcaaaattgtgggctcttgaattcattctctgattacagatattttaaataagctggtttctataagaacttcaagaaaaaccattttagctgcttaactggcacctttctcaggaagtaataacaccaaatattgctgattcctaggaaaacatttactacttgtaaagaatttcctgagttaaagtagttataacagtttatatacattaaaagtaaggttttactttaaaaaaaaaagtcttgggaataatagctaccatgtattggagtcctttccaggcactattgtatgtactttatatactttatcacatttaatcctcctgtcaatgctttgaggtaggtatgattcccattttatatatgagtaataaaaaaagctcaaggagtttaatcatttatcaagggtttcttctgcgaatgatagagccaggctgcgccgtcggctcctctagcctaacgttggtttacagtattcaaaaagagttgattgaattcaaggttttttttccatgtaaagctatttatatcttccaagcctaatgaaatggatattataaaaatacagttgattcatcctatgtttgggaagagtatttttagtgtaattattttccagcaattgtaagggcatatactgcttgtctcagaagaaaattccacgtagaggggctttaaagtctttatggaaaaaagaaaaataaaaatcatttttcttgttttagaaaaaaaaa

SEQ ID NO: 104 - protein, 107 aa, Homo sapiens
MAGEDVGAPPDHLWVHQEGIYRDEYQRTWVAVVEEETSFLRARVQQIQVPLGDAARPSHLLTSQLPLMWQLYPEERYMDNNSRLWQIQHHLMVRGVQELLLKLLPDD

SEQ ID NO: 105 - DNA, 3724 bp, Homo sapiens
  CDS (158)..(3364)
tctccctcggcgccgccgccgccgcccgcggggctgggacccgatgcggttagagccgcggagcctggaagagccccgagcgtttctgctttgggacaaccatacatctaattccttaaagtagttttatatgtaaaacttgcaaagaatcagaacaatgcctccacgaccatcatcaggtgaactgtggggcatccacttgatgcccccaagaatcctagtagaatgtttactaccaaatggaatgatagtgactttagaatgcctccgtgaggctacattaataaccataaagcatgaactatttaaagaagcaagaaaataccccctccatcaacttcttcaagatgaatcttcttacattttcgtaagtgttactcaagaagcagaaagggaagaattttttgatgaaacaagacgactttgtgaccttcggctttttcaaccctttttaaaagtaattgaaccagtaggcaaccgtgaagaaaagatcctcaatcgagaaattggttttgctatcggcatgccagtgtgtgaatttgatatggttaaagatccagaagtacaggacttccgaagaaatattctgaacgtttgtaaagaagctgtggatcttagggacctcaattcacctcatagtagagcaatgtatgtctatcctccaaatgtagaatcttcaccagaattgccaaagcacatatataataaattagataaagggcaaataatagtggtgatctgggtaatagtttctccaaataatgacaagcagaagtatactctgaaaatcaaccatgactgtgtaccagaacaagtaattgctgaagcaatcaggaaaaaaactcgaagtatgttgctatcctctgaacaactaaaactctgtgttttagaatatcagggcaagtatattttaaaagtgtgtggatgtgatgaatacttcctagaaaaatatcctctgagtcagtataagtatataagaagctgtataatgcttgggaggatgcccaatttgatgttgatggctaaagaaagcctttattctcaactgccaatggactgttttacaatgccatcttattccagacgcatttccacagctacaccatatatgaatggagaaacatctacaaaatccctttgggttataaatagtgcactcagaataaaaattctttgtgcaacctacgtgaatgtaaatattcgagacattgataagatctatgttcgaacaggtatctaccatggaggagaacccttatgtgacaatgtgaacactcaaagagtaccttgttccaatcccaggtggaatgaatggctgaattatgatatatacattcctgatcttcctcgtgctgctcgactttgcctttccatttgctctgttaaaggccgaaagggtgctaaagaggaacactgtccattggcatggggaaatataaacttgtttgattacacagacactctagtatctggaaaaatggctttgaatctttggccagtacctcatggattagaagatttgctgaaccctattggtgttactggatcaaatccaaataaagaaactccatgcttagagttggagtttgactggttcagcagtgtggtaaagttcccagatatgtcagtgattgaagagcatgccaattggtctgtatcccgagaagcaggatttagctattcccacgcaggactgagtaacagactagctagagacaatgaattaagggaaaatgacaaagaacagctcaaagcaatttctacacgagatcctctctctgaaatcactgagcaggagaaagattttctatggagtcacagacactattgtgtaactatccccgaaattctacccaaattgcttctgtctgttaaatggaattctagagatgaagtagcccagatgtattgcttggtaaaagattggcctccaatcaaacctgaacaggctatggaacttctggactgtaattacccagatcctatggttcgaggttttgctgttcggtgcttggaaaaatatttaacagatgacaaactttctcagtatttaattcagctagtacaggtcctaaaatatgaacaatatttggataacttgcttgtgagatttttactgaagaaagcattgactaatcaaaggattgggcactttttcttttggcatttaaaatctgagatgcacaataaaacagttagccagaggtttggcctgcttttggagtcctattgtcgtgcatgtgggatgtatttgaagcacctgaataggcaagtcgaggcaatggaaaagctcattaacttaactgacattctcaaacaggagaagaaggatgaaacacaaaaggtacagatgaagtttttagttgagcaaatgaggcgaccagatttcatggatgctctacagggctttctgtctcctctaaaccctgctcatcaactaggaaacctcaggcttgaagagtgtcgaattatgtcctctgcaaaaaggccactgtggttgaattgggagaacccagacatcatgtcagagttactgtttcagaacaatgagatcatctttaaaaatggggatgatttacggcaagatatgctaacacttcaaattattcgtattatggaaaatatctggcaaaatcaaggtcttgatcttcgaatgttaccttatggttgtctgtcaatcggtgactgtgtgggacttattgaggtggtgcgaaattctcacactattatgcaaattcagtgcaaaggcggcttgaaaggtgcactgcagttcaacagccacacactacatcagtggctcaaagacaagaacaaaggagaaatatatgatgcagccattgacctgtttacacgttcatgtgctggatactgtgtagctaccttcattttgggaattggagatcgtcacaatagtaacatcatggtgaaagacgatggacaactgtttcatatagattttggacactttttggatcacaagaagaaaaaatttggttataaacgagaacgtgtgccatttgttttgacacaggatttcttaatagtgattagtaaaggagcccaagaatgcacaaagacaagagaatttgagaggtttcaggagatgtgttacaaggcttatctagctattcgacagcatgccaatctcttcataaatcttttctcaatgatgcttggctctggaatgccagaactacaatcttttgatgacattgcatacattcgaaagaccctagccttagataaaactgagcaagaggctttggagtatttcatgaaacaaatgaatgatgcacatcatggtggctggacaacaaaaatggattggatcttccacacaattaaacagcatgcattgaactgaaaagataactgagaaaatgaaagctcactctggattccacactgcactgttaataactctcagcaggcaaagaccgattgcataggaattgcacaatccatgaacagcattagaatttacagcaagaacagaaataaaatactatataatttaaataatgtaaacgcaaacagggtttgatagcacttaaactagttcatttcaaaattaagctttagaataatgcgcaatttcatgttatgccttaagtccaaaaaggtaaactttgaagattgtttgtatctttttttaaaaaacaaaacaaaacaaaaatccccaaaatatatagaaatgatggagaaggaaaaaaaaaaaaaaaaa

SEQ ID NO: 106 - protein, 1068 aa, Homo sapiens
MPPRPSSGELWGIHLMPPRILVECLLPNGMIVTLECLREATLITIKHELFKEARKYPLHQLLQDESSYIFVSVTQEAEREEFFDETRRLCDLRLFQPFLKVIEPVGNREEKILNREIGFAIGMPVCEFDMVKDPEVQDFRRNILNVCKEAVDLRDLNSPHSRAMYVYPPNVESSPELPKHIYNKLDKGQIIVVIWVIVSPNNDKQKYTLKINHDCVPEQVIAEAIRKKTRSMLLSSEQLKLCVLEYQGKYILKVCGCDEYFLEKYPLSQYKYIRSCIMLGRMPNLMLMAKESLYSQLPMDCFTMPSYSRRISTATPYMNGETSTKSLWVINSALRIKILCATYVNVNIRDIDKIYVRTGIYHGGEPLCDNVNTQRVPCSNPRWNEWLNYDIYIPDLPRAARLCLSICSVKGRKGAKEEHCPLAWGNINLFDYTDTLVSGKMALNLWPVPHGLEDLLNPIGVTGSNPNKETPCLELEFDWFSSVVKFPDMSVIEEHANWSVSREAGFSYSHAGLSNRLARDNELRENDKEQLKAISTRDPLSEITEQEKDFLWSHRHYCVTIPEILPKLLLSVKWNSRDEVAQMYCLVKDWPPIKPEQAMELLDCNYPDPMVRGFAVRCLEKYLTDDKLSQYLIQLVQVLKYEQYLDNLLVRFLLKKALTNQRIGHFFFWHLKSEMHNKTVSQRFGLLLESYCRACGMYLKHLNRQVEAMEKLINLTDILKQEKKDETQKVQMKFLVEQMRRPDFMDALQGFLSPLNPAHQLGNLRLEECRIMSSAKRPLWLNWENPDIMSELLFQNNEIIFKNGDDLRQDMLTLQIIRIMENIWQNQGLDLRMLPYGCLSIGDCVGLIEVVRNSHTIMQIQCKGGLKGALQFNSHTLHQWLKDKNKGEIYDAAIDLFTRSCAGYCVATFILGIGDRHNSNIMVKDDGQLFHIDFGHFLDHKKKKFGYKRERVPFVLTQDFLIVISKGAQECTKTREFERFQEMCYKAYLAIRQHANLFINLFSMMLGSGMPELQSFDDIAYIRKTLALDKTEQEALEYFMKQMNDAHHGGWTTKMDWIFHTIKQHALN

SEQ ID NO: 107 - DNA, 4230 bp, Homo sapiens
  CDS (363)..(1889)
gaagggtcgggggatccctccgccgccagcgcgtggtcccggccccctccacccgccgtctcggccgcggccagcagcccctgccccccgggggacgctgacggccgcccggcgcgccgccctagcagacggacagggggcgctgcgcgcggcctggggcaacccgggccacaggggcaggaaagtgagggcccaggtcggcccgggcgtgcaggggccccgggttcgcagcggcggccgcggcagcgatagcggcactagcagcagcgggagtgccgggttgagccgggaagccgatggcggcggctgcggcggctccgattcctcgctgactgcccgtccgccctcctgcatcgagcgccatgttaccgacccaagctggggccgcggcggctctgggccggggctcggccctggggggcagcctgaaccggaccccgacggggcggccgggcggcggcggcgggacacgcggggctaacgggggccgggtccccgggaatggcgcggggctcgggcccggccgcctggagcgggaggctgcggcagcggcggcaaccaccccggcgcccaccgcgggggccctctacagcggcagcgagggcgactcggagtcgggcgaggaggaggagctgggcgccgagcggcgcggcctgaagcggagcctgagcgagatggagatcggtatggtggtcggtgggcccgaggcgtcggcagcggccaccgggggctacgggccggtgagcggcgcggtgagcggggccaagccgggtaagaagacccggggccgcgtgaagatcaagatggagttcatcgacaacaagctgcggcgctacacgaccttcagcaagaggaagacgggcatcatgaagaaggcctatgagctgtccacgctgacagggacacaggtgctgttgctggtggccagtgagacaggccatgtgtatacctttgccacccgaaaactgcagcccatgatcaccagtgagaccggcaaggcactgattcagacctgcctcaactcgccagactctccaccccgttcagaccccacaacagaccagagaatgagtgccactggctttgaagagacagatctcacctaccaggtgtcggagtctgacagcagtggggagaccaaggacacactgaagccggcgttcacagtcaccaacctgccgggtacaacctccaccatccaaacagcacctagcacctctaccaccatgcaagtcagcagcggcccctcctttcccatcaccaactacctggcaccagtgtctgctagtgtcagccccagtgctgtcagcagtgccaatgggactgtgctgaagagtacaggcagcggccctgtctcctctgggggccttatgcagctgcctaccagcttcaccctcatgcctggtggggcagtggcccagcaggtcccagtgcaggccattcaagtgcaccaggccccacagcaagcgtctccctcccgtgacagcagcacagacctcacgcagacctcctccagcgggacagtgacgctgcccgccaccatcatgacgtcatccgtgcccacaactgtgggtggccacatgatgtaccctagcccgcatgcggtgatgtatgcccccacctcgggcctgggtgatggcagcctcaccgtgctgaatgccttctcccaggcaccatccaccatgcaggtgtcacacagccaggtccaggagccaggtggcgtcccccaggtgttcctgacagcatcatctgggacagtgcagatccctgtttcagcagttcagctccaccagatggctgtgatagggcagcaggccgggagcagcagcaacctcaccgagctacaggtggtgaacctggacaccgcccacagcaccaagagtgaatgatccgcccgccgccctggacagatggcccaagggatggcaccacttatttattgttgccttttcacgttttctttacacacacgttgacgggccgcaggagggaggcggggaggaggaacgggcagccacaggactgagccctctcactccagccaaagaaatgggcctgcctgcctccacccgtcctccctcagcctccccttcttcccgccccacctcccatttctgttgctggaggggctgtcctccttcctgggaccccctcgccagcttggctcgatgtttgccatgagtattagcttacccaatgggaccgtgccccacctccccacacacaggccttctgtggggctgggcaccgtgtcctcctctgaggaagcagttggggccctcttgccagcctccttgctgaccccaggtcagccctgtgtctgtcacaggctgggtcaaaagagccctggctctgcccctcagggggccagctggggagatgggggcttcttcctcacactgctgtcctctcccccttcagctcctgagtagctgggcctgtgcactgggcaggttcctggggccgcctgccctgccttgccgctccccttggacctccaggggctcctgggttggagggaaccaccagcgttcccttctcccccttgtcttcccccctctcctcccagctgctttacttaaagttgattttgaactttttatttgaggagacgaagtgaaaacaaatctataaatatatatttttaaaatatttaacttttttttatggcgtttttctcgtccccctccctgcccaaactccccttccctggggagccctcaggctccccagaactggctgggcccctggggacagagccaccccatgagctcggggtccaccagtgtgtgggggagattctgggtttgcccagtcctgggttgtttccaggagaaagccgggggaggggccctcaggccattccccaacggggtggggagggtgacccacagctctgggcctctttttgccctttagggctgttgctagggagagggaagagggagaccaaatgtcggggttggggtgggagggcgtcaggcagaggcaactgacttcatttgtgccacacgcatgggcattgcagccttgcgctgtcccaggcatgcagctgcctggggcccaagttgcagtgagcagggtggggtctgggagggggtgagaggcaggaatgggggtcagaagaagtgggagcagcttcttgggctgagtgcagccaaaggggagccagaaatgggcagttctcccagggagtgagcagctactgtaacttttttaaattaagacaaaaagccttgaagaaaatgactttatttttctaagtgtaacctcagtatttatgtaatttgtacaggggccatgccccacccccctcctccccctttggggtagaccttgagggtgggccagcataggggggagggtcttttaccctgtgtcagagcctaccttcaccacctatatccagaaggggagctttttcagaaacagggcagcagtggggtgaaattttcttaacccctaagactgccttcagtaggaacaagctggcttctgtgattaggtgaagggatgggggaagattttatgcacagcctagttatcaaggggatgatttgccgacatgtttgagaaccccctaacctctaaccctcattgctgtcttgccccagtttggggtgccaagatggaagtcacctttctgggctttctcctggagatagctggggcttatgggtggctttcaaggctggggcatggcaaatcaggggccagagagcaggggagcttgggactcaggtctgtaactgcccagccccttttctctgctcttgtttcactccaccatcactcactcactccccactcccccacccatggggaggagacctttgatgaattcttcctctccttcccacaaaagacagacccagtgagtgaatcaggcaaagtgcttataatgtgtgttgtgtgagcgtggccttgggaggacatgcgtgtgtcagggatgagttgaggtgatatttttatgtgcagcgacccttggtgtttcccttcctcggtggctctggggtatgtgtgtgtgggtgtgtgcgcctgagtgagtgtgtgtgcttgaatgtgagtgtgtatgtcagtggtttctacttcccctgggatgctgacccaggaatagtggacatggtcacagtcctatgtacagagctttcttttgtattaaaaaaaaatactctttcaataaatgtatcatttttgtgcacagaaaaaaaaaaaaaaaaaaaaaaaaaa

SEQ ID NO: 108 - protein, 508 aa, Homo sapiens
MLPTQAGAAAALGRGSALGGSLNRTPTGRPGGGGGTRGANGGRVPGNGAGLGPGRLEREAAAAAATTPAPTAGALYSGSEGDSESGEEEELGAERRGLKRSLSEMEIGMVVGGPEASAAATGGYGPVSGAVSGAKPGKKTRGRVKIKMEFIDNKLRRYTTFSKRKTGIMKKAYELSTLTGTQVLLLVASETGHVYTFATRKLQPMITSETGKALIQTCLNSPDSPPRSDPTTDQRMSATGFEETDLTYQVSESDSSGETKDTLKPAFTVTNLPGTTSTIQTAPSTSTTMQVSSGPSFPITNYLAPVSASVSPSAVSSANGTVLKSTGSGPVSSGGLMQLPTSFTLMPGGAVAQQVPVQAIQVHQAPQQASPSRDSSTDLTQTSSSGTVTLPATIMTSSVPTTVGGHMMYPSPHAVMYAPTSGLGDGSLTVLNAFSQAPSTMQVSHSQVQEPGGVPQVFLTASSGTVQIPVSAVQLHQMAVIGQQAGSSSNLTELQVVNLDTAHSTKSE

SEQ ID NO: 109 - DNA, 21 bp, Artificial
  Combined DNA/RNA molecule: Synthetic oligonucleotide
  misc_feature (1)..(19): RNA
ccuuuugagacccugcugutt

SEQ ID NO: 110 - DNA, 21 bp, Artificial
  Combined DNA/RNA molecule: Synthetic oligonucleotide
  misc_feature (1)..(19): RNA
acagcagggucucaaaaggtt

SEQ ID NO: 111 - DNA, 21 bp, Artificial
  Combined DNA/RNA molecule: Synthetic oligonucleotide
  misc_feature (1)..(19): RNA
cuggggaagaaggugaguatt

SEQ ID NO: 112 - DNA, 21 bp, Artificial
  Combined DNA/RNA molecule: Synthetic oligonucleotide
  misc_feature (1)..(19): RNA
uacucaccuucuuccccagtt

SEQ ID NO: 113 - DNA, 21 bp, Artificial
  Combined DNA/RNA molecule: Synthetic oligonucleotide
  misc_feature (1)..(19): RNA
caagauagccagaguuuaatt

SEQ ID NO: 114 - DNA, 21 bp, Artificial
  Combined DNA/RNA molecule: Synthetic oligonucleotide
  misc_feature (1)..(19): RNA
uuaaacucuggcuaucuugtt
